(19) United States
(12) Patent Application Publication
(10) Pub. No.: US 2024/0059792 A1
(43) Pub. Date: Feb. 22, 2024

(54) SIALIDASE-HER2-ANTIBODY FUSION PROTEINS AND METHODS OF USE THEREOF

(71) Applicant: Palleon Pharmaceuticals Inc., Waltham, MA (US)

(72) Inventors: Li Peng, Lexington, MA (US); Lizhi Cao, Stoneham, MA (US); Sandip A. Shelke, Belmont, MA (US)

(21) Appl. No.: 18/260,383

(22) PCT Filed: Jan. 6, 2022
(86) PCT No.: PCT/US2022/011499

§ 371 Date: Jul. 5, 2023

Related U.S. Application Data
(60) Provisional application No. 63/217,998, filed on Jul. 2, 2021.
(60) Provisional application No. 63/134,411, filed on Jan. 6, 2021.

(51) Int. Cl. C07K 16/32; A61P 35/00; C12N 9/24; C12N 15/63

(52) U.S. Cl. CPC C07K 16/32; A61P 35/00; C12N 9/2402; C12N 15/63; C07K 2317/52; C12Y 302/01018

(57) ABSTRACT

The invention relates generally to recombinant sialidase and anti-HER2 immunoglobulin antigen-binding domain fusion proteins. The invention also provides antibody conjugates including a sialidase and an anti-HER2 antibody or a portion thereof. The invention further relates to methods of using the sialidase fusion proteins or antibody conjugates for treating cancer.

### CROSS-REFERENCE TO RELATED APPLICATIONS

[0001] This application claims the benefit of and priority to U.S. Provisional Patent Application No. 63/134,411, filed Jan. 6, 2021, and U.S. Provisional Patent Application No. 63/217,998, filed Jul. 2, 2021, the entire disclosures of which are incorporated herein by reference in their entirety for all purposes.

### FIELD OF THE INVENTION

[0002] The invention relates generally to recombinant sialidase fusion proteins and antibody conjugates, and their use in the treatment of cancer.

### BACKGROUND

[0003] A growing body of evidence supports roles for glycans, and, in particular, sialoglycans, at various pathophysiological steps of tumor progression. Glycans regulate tumor proliferation, invasion, hematogenous metastasis and angiogenesis (Fuster et al. (2005) NAT. REV. CANCER 5(7): 526-42). The sialylation of cell surface glycoconjugates is frequently altered in cancers, resulting in the expression of sialylated tumor-associated carbohydrate antigens. The expression of sialylated glycans by tumor cells is often associated with increased aggressiveness and metastatic potential of a tumor. (Julien S., Delannoy P. (2015) Sialic Acid and Cancer. In: Taniguchi N., Endo T., Hart G., Seeberger P., Wong C H. (eds) GLYCOSCIENCE: BIOLOGY AND MEDICINE, Springer, Tokyo. https://doi.org/10.1007/978-4-431-54841-6_193).

[0004] It has recently become apparent that Siglecs (sialic acid-binding immunoglobulin-like lectins), a family of sialic acid binding lectins, play a role in cancer immune suppression by binding to hypersialylated cancer cells and mediating the suppression of signals from activating NK cell receptors, thereby inhibiting NK cell-mediated killing of tumor cells (Jandus et al. (2014) J. CLIN. INVEST. 124: 1810-1820; Läubli et al. (2014) PROC. NATL. ACAD. SCI. USA 111: 14211-14216; Hudak et al. (2014) NAT. CHEM. BIOL. 10: 69-75). Likewise, enzymatic removal of sialic acids by treatment with sialidase can enhance NK cell-mediated killing of tumor cells (Jandus, supra; Hudak, supra; Xiao et al. (2016) PROC. NATL. ACAD. SCI. USA 113(37): 10304-9).

[0005] The gene encoding HER2 is located on chromosome 17 and is a member of the EGF/erbB growth factor receptor gene family, which also includes epidermal growth factor receptor (EGFR, or HER1), HER3/erbB3 and HER4/erbB4. All of these genes encode transmembrane growth factor receptors, which are tyrosine kinase type 1 receptors with growth stimulating potential. Activation of HER family members generally occurs when the ligand and a dimer of the same monomer or other member of the HER family are bound together. HER2 has no known ligand. Once activation has occurred, tyrosine autophoshorylation of cytoplasmic signal proteins transmit signals to the nucleus, thus regulating aspects of cell growth, division, differentiation and migration.

[0006] Overexpression of HER2 receptors results in receptors transmitting excessive signals for cell proliferation to the nucleus (Gutierrez et al. (2011) ARCH. PATHOL. LAB. MED. 135(1): 55-62). Data supports the hypothesis that, for certain cancers, overexpression of HER2 directly contributes to the pathogenesis and clinical aggressiveness of tumor cells, and is associated with poor prognosis, including reduced relapse-free and overall survival (Iqbal et al. (2014) MOL. BIOL. INT. 2014: 852748). Anti-HER2 antibodies include trastuzumab, which has been approved in the United States for use in the treatment of, for example, breast cancer and gastric or gastroesophageal junction adenocarcinomas, and pertuzumab, which has been approved in the United States for use in the treatment of, for example, breast cancer.

[0007] Cancer immunotherapies have improved the outcome of many cancer patients. However, despite advances that have been made to date, many patients do not respond or only partially respond to currently available therapies. Accordingly, there is still a need for effective interventions for treating cancers associated with hypersialylated cancer cells.

### SUMMARY OF THE INVENTION

[0008] The invention is based, in part, upon the discovery that it is possible to produce fusion proteins containing a sialidase enzyme and an anti-HER2 immunoglobulin or a portion thereof, e.g., an antigen-binding domain and/or an immunoglobulin Fc domain, and/or antibody conjugates including a sialidase enzyme and an anti-HER2 antibody or a portion thereof, e.g., an antigen-binding domain and/or an immunoglobulin Fc domain. The sialidase enzyme portion of the fusion protein and/or antibody conjugate may comprise at least one mutation relative to a wild-type sialidase. The mutations, or combination of mutations, can improve the expression, activity or both the expression and activity of the sialidase to improve its use in cancer diagnosis and/or treatment.

[0009] The fusion proteins and/or antibody conjugates have suitable substrate specificities and activities to be useful in removing sialic acid and/or sialic acid containing molecules from the surface of cancer cells, e.g., HER2-expressing cancer cells, and/or removing sialic acid and/or sialic acid containing molecules from the tumor microenvironment, and/or reducing the concentration of sialic acid and/or sialic acid containing molecules in the tumor microenvironment.

[0010] Accordingly, in one aspect, the invention provides a fusion protein comprising (or consisting essentially of): (a) sialidase enzyme; and (b) an anti-HER2 immunoglobulin antigen-binding domain.

[0011] In certain embodiments, the sialidase is a human sialidase, e.g., a recombinant mutant human sialidase. In certain embodiments, the sialidase comprises: (a) a substitution of a proline residue at a position corresponding to position 5 of wild-type human Neu2 (P5); (b) a substitution of a lysine residue at a position corresponding to position 9 of wild-type human Neu2 (K9); (c) a substitution of an alanine residue at a position corresponding to position 42 of wild-type human Neu2 (A42); (d) a substitution of a lysine residue at a position corresponding to position 44 of wild-type human Neu2 (K44); (e) a substitution of a lysine residue at a position corresponding to position 45 of wild-type human Neu2 (K45); (f) a substitution of a leucine residue at a position corresponding to position 54 of wild-type human Neu2 (L54); (g) a substitution of a proline residue at a position corresponding to position 62 of wild-type human Neu2 (P62); (h) a substitution of a glutamine residue at a position corresponding to position 69 of wild-type human Neu2 (Q69); (i) a substitution of an arginine residue at a position corresponding to position 78 of wild-type human Neu2 (R78); (j) a substitution of an aspartic acid residue at a position corresponding to position 80 of wild-type human Neu2 (D80); (k) a substitution of an alanine residue at a position corresponding to position 93 of wild-type human Neu2 (A93); (1) a substitution of a glycine residue at a position corresponding to position 107 of wild-type human Neu2 (G107); (m) a substitution of a glutamine residue at a position corresponding to position 108 of wild-type human Neu2 (Q108); (n) a substitution of a glutamine residue at a position corresponding to position 112 of wild-type human Neu2 (Q112); (o) a substitution of a cysteine residue at a position corresponding to position 125 of wild-type human Neu2 (C125); (p) a substitution of a glutamine residue at a position corresponding to position 126 of wild-type human Neu2 (Q126); (q) a substitution of an alanine residue at a position corresponding to position 150 of wild-type human Neu2 (A150); (r) a substitution of a cysteine residue at a position corresponding to position 164 of wild-type human Neu2 (C164); (s) a substitution of an arginine residue at a position corresponding to position 170 of wild-type human Neu2 (R170); (t) a substitution of an alanine residue at a position corresponding to position 171 of wild-type human Neu2 (A171); (u) a substitution of a glutamine residue at a position corresponding to position 188 of wild-type human Neu2 (Q188); (v) a substitution of an arginine residue at a position corresponding to position 189 of wild-type human Neu2 (R189); (w) a substitution of an alanine residue at a position corresponding to position 213 of wild-type human Neu2 (A213); (x) a substitution of a leucine residue at a position corresponding to position 217 of wild-type human Neu2 (L217); (y) a substitution of a glutamic acid residue at a position corresponding to position 225 of wild-type human Neu2 (E225); (z) a substitution of a histidine residue at a position corresponding to position 239 of wild-type human Neu2 (H239); (aa) a substitution of a leucine residue at a position corresponding to position 240 of wild-type human Neu2 (L240); (bb) a substitution of an arginine residue at a position corresponding to position 241 of wild-type human Neu2 (R241); (cc) a substitution of an alanine residue at a position corresponding to position 242 of wild-type human Neu2 (A242); (dd) a substitution of a valine residue at a position corresponding to position 244 of wild-type human Neu2 (V244); (ee) a substitution of a threonine residue at a position corresponding to position 249 of wild-type human Neu2 (T249); (ff) a substitution of an aspartic acid residue at a position corresponding to position 251 of wild-type human Neu2 (D251); (gg) a substitution of a glutamic acid residue at a position corresponding to position 257 of wild-type human Neu2 (E257); (hh) a substitution of a serine residue at a position corresponding to position 258 of wild-type human Neu2 (S258); (ii) a substitution of a leucine residue at a position corresponding to position 260 of wild-type human Neu2 (L260); (jj) a substitution of a valine residue at a position corresponding to position 265 of wild-type human Neu2 (V265); (kk) a substitution of a glutamine residue at a position corresponding to position 270 of wild-type human Neu2 (Q270); (ll) a substitution of a tryptophan residue at a position corresponding to position 292 of wild-type human Neu2 (W292); (mm) a substitution of a serine residue at a position corresponding to position 301 of wild-type human Neu2 (S301); (nn) a substitution of a tryptophan residue at a position corresponding to position 302 of wild-type human Neu2 (W302); (oo) a substitution of a valine residue at a position corresponding to position 363 of wild-type human Neu2 (V363); or (pp) a substitution of a leucine residue at a position corresponding to position 365 of wild-type human Neu2 (L365); or a combination of any of the foregoing substitutions. For example, the sialidase may comprise a substitution of K9, A42, P62, A93, Q216, A242, Q270, S301, W302, V363, or L365, or a combination of any of the foregoing substitutions.

[0012] In certain embodiments, in the sialidase: (a) the proline residue at a position corresponding to position 5 of wild-type human Neu2 is substituted by histidine (P5H); (b) the lysine residue at a position corresponding to position 9 of wild-type human Neu2 is substituted by aspartic acid (K9D); (c) the alanine residue at a position corresponding to position 42 of wild-type human Neu2 is substituted by arginine (A42R) or aspartic acid (A42D); (d) the lysine residue at a position corresponding to position 44 of wild-type human Neu2 is substituted by arginine (K44R) or glutamic acid (K44E); (e) the lysine residue at a position corresponding to position 45 of wild-type human Neu2 is substituted by alanine (K45A), arginine (K45R), or glutamic acid (K45E); (f) the leucine residue at a position corresponding to position 54 of wild-type human Neu2 is substituted by methionine (L54M); (g) the proline residue at a position corresponding to position 62 of wild-type human Neu2 is substituted by asparagine (P62N), aspartic acid (P62D), histidine (P62H), glutamic acid (P62E), glycine (P62G), serine (P62S), or threonine (P62T); (h) the glutamine residue at a position corresponding to position 69 of wild-type human Neu2 is substituted by histidine (Q69H); (i) the arginine residue at a position corresponding to position 78 of wild-type human Neu2 is substituted by lysine (R78K); (j) the aspartic acid residue at a position corresponding to position 80 of wild-type human Neu2 is substituted by proline (D80P); (k) the alanine residue at a position corresponding to position 93 of wild-type human Neu2 is substituted by glutamic acid (A93E) or lysine (A93K); (l) the glycine residue at a position corresponding to position 107 of wild-type human Neu2 is substituted by aspartic acid (G107D); (m) the glutamine residue at a position corresponding to position 108 of wild-type human Neu2 is substituted by histidine (Q108H); (n) the glutamine residue at a position corresponding to position 112 of wild-type human Neu2 is substituted by arginine (Q112R) or lysine (Q112K); (o) the cysteine residue at a position corresponding to position 125 of wild-type human Neu2 is substituted by leucine (C125L); (p) the glutamine residue at a position corresponding to position 126 of wild-type human Neu2 is substituted by leucine (Q126L), glutamic acid (Q126E), phenylalanine (Q126F), histidine (Q126H), isoleucine (Q1261), or tyrosine (Q126Y); (q) the alanine residue at a position corresponding to position 150 of wild-type human Neu2 is substituted by valine (A150V); (r) the cysteine residue at a position corresponding to position 164 of wild-type human Neu2 is substituted by glycine (C164G); (s) the arginine residue at a position corresponding to position 170 of wild-type human Neu2 is substituted by proline (R170P); (t) the alanine residue at a position corresponding to position 171 of wild-type human Neu2 is substituted by glycine (A171G); (u) the glutamine residue at a position corresponding to position 188 of wild-type human Neu2 is substituted by proline (Q188P); (v) the arginine residue at a position corresponding to position 189 of wild-type human Neu2 is substituted by proline (R189P); (w) the alanine residue at a position corresponding to position 213 of wild-type human Neu2 is substituted by cysteine (A213C), asparagine (A213N), serine (A213S), orthreonine (A213T); (x) the leucine residue at a position corresponding to position 217 of wild-type human Neu2 is substituted by alanine (L217A) or valine (L217V); (y) the threonine residue at a position corresponding to position 249 of wild-type human Neu2 is substituted by alanine (T249A); (z) the aspartic acid residue at a position corresponding to position 251 of wild-type human Neu2 is substituted by glycine (D251G); (aa) the glutamic acid residue at a position corresponding to position 225 of wild-type human Neu2 is substituted by proline (E225P); (bb) the histidine residue at a position corresponding to position 239 of wild-type human Neu2 is substituted by proline (H239P); (cc) the leucine residue at a position corresponding to position 240 of wild-type human Neu2 is substituted by aspartic acid (L240D), asparagine (L240N), or tyrosine (L240Y); (dd) the arginine residue at a position corresponding to position 241 of wild-type human Neu2 is substituted by alanine (R241A), aspartic acid (R241D), leucine (R241L), glutamine (R241Q), or tyrosine (R241Y); (ee) the alanine residue at a position corresponding to position 242 of wild-type human Neu2 is substituted by cysteine (A242C), phenylalanine (A242F), glycine (A242G), histidine (A242H), isoleucine (A242I), lysine (A242K), leucine (A242L), methionine (A242M), asparagine (A242N), glutamine (A242Q), arginine (A242R), serine (A242S), valine (A242V), tryptophan (A242W), or tyrosine (A242Y); (ff) the valine residue at a position corresponding to position 244 of wild-type human Neu2 is substituted by isoleucine (V244I), lysine (V244K), or proline (V244P); (gg) the glutamic acid residue at a position corresponding to position 257 of wild-type human Neu2 is substituted by proline (E257P); (hh) the serine residue at a position corresponding to position 258 is substituted by cysteine (S258C); (ii) the leucine residue at a position corresponding to position 260 of wild-type human Neu2 is substituted by aspartic acid (L260D), phenylalanine (L260F), glutamine (L260Q), or threonine (L260T); (j) the valine residue at a position corresponding to position 265 of wild-type human Neu2 is substituted by phenylalanine (V265F); (kk) the glutamine residue at a position corresponding to position 270 of wild-type human Neu2 is substituted by alanine (Q270A), histidine (Q270H), phenylalanine (Q270F), proline (Q270P), serine (Q270S), or threonine (Q270T); (ll) the tryptophan residue at a position corresponding to position 292 of wild-type human Neu2 is substituted by arginine (W292R); (mm) the serine residue at a position corresponding to position 301 of wild-type human Neu2 is substituted by alanine (S301A), aspartic acid (S301D), glutamic acid (S301E), phenylalanine (S301F), histidine (S301H), lysine (S301K), leucine (S301L), methionine (S301M), asparagine (S301N), proline (S301P), glutamine (S301Q), arginine (S301R), threonine (S301T), valine (S301V), tryptophan (S301W), or tyrosine (S301Y)); (nn) the tryptophan residue at a position corresponding to position 302 of wild-type human Neu2 is substituted by alanine (W302A), aspartic acid (W302D), phenylalanine (W302F), glycine (W302G), histidine (W302H), isoleucine (W302I), lysine (W302K), leucine (W302L), methionine (W302M), asparagine (W302N), proline (W302P), glutamine (W302Q), arginine (W302R), serine (W302S), threonine (W302T), valine (W302V), or tyrosine (W302Y); (oo) the valine residue at a position corresponding to position 363 of wild-type human Neu2 is substituted by arginine (V363R); or (pp) the leucine residue at a position corresponding to position 365 of wild-type human Neu2 is substituted by glutamine (L365Q), histidine (L365H), isoleucine (L365I), lysine (L365K) or serine (L365S); or the sialidase comprises a combination of any of the foregoing substitutions. For example, the sialidase may comprise a substitution selected from K9D, A42R, P62G, P62N, P62S, P62T, A93E, Q126Y, A242F, A242W, A242Y, Q270A, Q270T, S301A, S301R, W302K, W302R, V363R, and L365I, or a combination of any of the foregoing substitutions.

[0013] In certain embodiments, the sialidase comprises: (a) a substitution or deletion of a methionine residue at a position corresponding to position 1 of wild-type human Neu2 (M1); (b) a substitution of a valine residue at a position corresponding to position 6 of wild-type human Neu2 (V6); (c) a substitution of an isoleucine residue at a position corresponding to position 187 of wild-type human Neu2 (I187); or (d) a substitution of a cysteine residue at a position corresponding to position 332 of wild-type human Neu2 (C332); or a combination of any of the foregoing substitutions.

[0014] In certain embodiments, in the sialidase: (a) the methionine residue at a position corresponding to position 1 of wild-type human Neu2 is deleted (ΔM1), is substituted by alanine (MIA), or is substituted by aspartic acid (MID); (b) the valine residue at a position corresponding to position 6 of wild-type human Neu2 is substituted by tyrosine (V6Y); (c) the isoleucine residue at a position corresponding to position 187 of wild-type human Neu2 is substituted by lysine (I187K); or (d) the cysteine residue at a position corresponding to position 332 of wild-type human Neu2 is substituted by alanine (C332A); or the sialidase comprises a combination of any of the foregoing substitutions.

[0015] In certain embodiments, the sialidase comprises: (a) the MID, V6Y, P62G, A93E, I187K, and C332A substitutions; (b) the MID, V6Y, K9D, A93E, I187K, C332A, V363R, and L365I substitutions; (c) the MID, V6Y, P62N, I187K, and C332A substitutions; (d) the MID, V6Y, I187K, Q270A, S301R, W302K, and C332A substitutions; (e) the MID, V6Y, P62S, I187K, Q270A, S301R, W302K, and C332A substitutions; (f) the MID, V6Y, P62T, I187K, Q270A, S301R, W302K, and C332A substitutions; (g) the MID, V6Y, P62N, I187K, Q270A, S301R, W302K, and C332A substitutions; (h) the MID, V6Y, P62G, A93E, I187K, S301A, W302R, and C332A substitutions; (i) the MID, V6Y, P62G, A93E, Q126Y, I187K, Q270T, and C332A substitutions; (j) the MID, V6Y, P62G, A93E, Q126Y, I187K, and C332A substitutions; (k) the MID, V6Y, P62G, A93E, Q126Y, I187K, A242F, Q270T, and C332A substitutions; or (1) the MID, V6Y, A42R, P62G, A93E, Q126Y, I187K, A242F, Q270T, and C332A substitutions.

[0016] In certain embodiments, the sialidase is selected from Neu1, Neu2, Neu3, and Neu4, e.g., the sialidase is Neu2.

[0017] In certain embodiments, the sialidase has a different substrate specificity than the corresponding wild-type sialidase. For example, in certain embodiments the sialidase can cleave a2,3, a2,6, and/or a2,8 linkages. In certain embodiments the sialidase can cleave a2,3 and a2,8 linkages.

[0018] In certain embodiments, the sialidase comprises any one of SEQ ID NOs: 48-54, 149, 154, 159, 191, or 198, or an amino acid sequence that has at least 85%, 90%, 95%, 96%, 97%, 98%, or 99% sequence identity to any one of SEQ ID NOs: 48-54, 149, 154, 159, 191, or 198.

[0019] In certain embodiments, the sialidase comprises mutation or combination of mutations set forth in any one of TABLES 1-11, hereinbelow.

[0020] In certain embodiments, the fusion protein further comprises an immunoglobulin Fc domain. In certain embodiments, the immunoglobulin Fc domain is derived from a human IgG1, IgG2, IgG3, IgG4, IgA1, IgA2, IgD, IgE, or IgM Fc domain, e.g., the immunoglobulin Fc domain is derived from a human IgG1, IgG2, IgG3, or IgG4 Fc domain, e.g., the immunoglobulin Fc domain is derived from a human IgG1 Fc domain.

[0021] In certain embodiments, the anti-HER2 immunoglobulin antigen-binding domain is associated (for example, covalently or non-covalently associated) with a second anti-HER2 immunoglobulin antigen-binding domain to produce an anti-HER2 antigen-binding site.

[0022] In certain embodiments, the anti-HER2 immunoglobulin antigen-binding domain is derived from an antibody selected from trastuzumab, pertuzumab, CT-P6, trastuzumab-dkst, MGAH22 (margetuximab), PF-05280014, ertumaxomab, gancotamab, timigutuzumab, Ontruzant, ABP-980, SB3, DS-8201, MYL-1410, BCD-022, and HD201, e.g., the anti-HER2 immunoglobulin antigen-binding domain is derived from trastuzumab.

[0023] In certain embodiments, the sialidase and the immunoglobulin Fc domain and/or the anti-HER2 immunoglobulin antigen-binding domain are linked by a peptide bond or an amino acid linker.

[0024] In certain embodiments, the fusion protein comprises any one of SEQ ID NOs: 66-85, 98-142, 150-153, 155-158, 160-163, 166-178, 185, 187, 189, 192-197, 203-210, 218, 220, 222, 224, 226, 228, 230, 232, 234, 236, 238, 240, 242, 244, or 249.

[0025] In another aspect, the invention provides an antibody conjugate comprising any of the foregoing fusion proteins. In certain embodiments, the antibody conjugate comprises a single sialidase. In other embodiments, the antibody conjugate comprises two sialidases, which can be the same or different. In certain embodiments the antibody conjugate comprises two identical sialidases. In certain embodiments, the antibody conjugate comprises a single anti-HER2 antigen-binding site. In other embodiments, the antibody conjugate comprises two anti-HER2 antigen-binding sites, which can be the same or different. In certain embodiments, the antibody conjugate comprises two identical anti-HER2 antigen-binding sites.

[0026] In certain embodiments, the antibody conjugate has a molecular weight from about 135 kDa to about 165 kDa, or the antibody conjugate has a molecular weight from about 215 kDa to about 245 kDa.

[0027] In certain embodiments, the antibody conjugate comprises: (a) a first polypeptide comprising an immunoglobulin light chain; (b) a second polypeptide comprising an immunoglobulin heavy chain; and (c) a third polypeptide comprising an immunoglobulin Fc domain and a sialidase; wherein the first and second polypeptides are covalently linked together and the second and third polypeptides are covalently linked together, and wherein the first polypeptide and the second polypeptide together define an anti-HER2 antigen-binding site. The third polypeptide may, for example, comprise the sialidase and the immunoglobulin Fc domain in an N- to C-terminal orientation. The first polypeptide may, for example, comprise SEQ ID NO: 66, the second polypeptide may, for example, comprise any one of SEQ ID NOs: 67 or 189, and/or the third polypeptide may, for example, comprise any one of SEQ ID NOs: 68-74, 98-112, 150, 151, 155, 156, 160, 161, 185, 187, 192, 195, 203-208. In certain embodiments, the first polypeptide comprises SEQ ID NO: 66, the second polypeptide comprises SEQ ID NO: 189, and the third polypeptide comprises SEQ ID NO: 205.

[0028] In certain embodiments, the antibody conjugate comprises: (a) a first polypeptide comprising a first immunoglobulin light chain; (b) a second polypeptide comprising a first immunoglobulin heavy chain and a first sialidase; (c) a third polypeptide comprising a second immunoglobulin heavy chain and a second sialidase; and (d) a fourth polypeptide comprising a second immunoglobulin light chain; wherein the first and second polypeptides are covalently linked together, the third and fourth polypeptides are covalently linked together, and the second and third polypeptides are covalently linked together, and wherein the first polypeptide and the second polypeptide together define a first anti-HER2 antigen-binding site, and the third polypeptide and the fourth polypeptide together define a second anti-HER2 antigen-binding site. The second and third polypeptides may, for example, comprise the first and second immunoglobulin heavy chain and the first and second sialidase, respectively, in an N- to C-terminal orientation.

[0029] In certain embodiments, the antibody conjugate comprises: (a) a first polypeptide comprising a first sialidase, a first immunoglobulin Fc domain, and a first single chain variable fragment (scFv); and (b) a second polypeptide comprising a second sialidase, a second immunoglobulin Fc domain, and an optional second single chain variable fragment (scFv); wherein the first and second polypeptides are covalently linked together, and wherein the first scFv defines a first anti-HER2 antigen-binding site, and the second scFv, when present, defines a second anti-HER2 antigen-binding site. The first polypeptide may, for example comprise the first sialidase, the first immunoglobulin Fc domain, and the first scFv in an N- to C-terminal orientation. The second polypeptide may, for example, comprise the second sialidase, the second immunoglobulin Fc domain, and the optional second scFv in an N- to C-terminal orientation. The first polypeptide may, for example, comprise any one of SEQ ID NOs: 77-83, 166-178, 194, 197, 244, or 249, and/or the second polypeptide may, for example, comprise any one of SEQ ID NOs: 77-83, 166-178, 194, 197, 244, or 249.

[0030] In certain embodiments, the antibody conjugate comprises: (a) a first polypeptide comprising an immunoglobulin light chain; (b) a second polypeptide comprising an immunoglobulin heavy chain and a single chain variable fragment (scFv); and (c) a third polypeptide comprising an immunoglobulin Fc domain and a sialidase, wherein the first and second polypeptides are covalently linked together and the second and third polypeptides are covalently linked together, and wherein the immunoglobulin light chain and immunoglobulin heavy chain together define a first anti-HER2 antigen-binding site and the scFv defines a second anti-HER2 antigen-binding site. The second polypeptide may, for example comprise the immunoglobulin heavy chain and the scFv in an N- to C-terminal orientation. The third polypeptide may, for example, comprise the sialidase and the immunoglobulin Fc domain in an N- to C-terminal orientation.

[0031] In another aspect, the invention provides an isolated nucleic acid comprising a nucleotide sequence encoding any of the foregoing fusion proteins or at least a portion of any of the foregoing antibody conjugates. In another aspect, the invention provides an expression vector comprising any of the foregoing nucleic acids. In another aspect, the invention provides a host cell comprising any of the foregoing expression vectors.

[0032] In another aspect, the invention provides a pharmaceutical composition comprising any of the foregoing fusion proteins or any of the foregoing antibody conjugates.

[0033] In another aspect, the invention provides a method of treating cancer in a subject in need thereof. The method comprises administering to the subject an effective amount of any of the foregoing fusion proteins, any of the foregoing antibody conjugates, or any of the foregoing pharmaceutical compositions.

[0034] In certain embodiments, the cancer is selected from lung bronchioloalveolar carcinoma (BAC), bladder cancer, a female genital tract malignancy (e.g., uterine serous carcinoma, endometrial carcinoma, vulvar squamous cell carcinoma, and uterine sarcoma), an ovarian surface epithelial carcinoma (e.g., clear cell carcinoma of the ovary, epithelial ovarian cancer, fallopian tube cancer, and primary peritoneal cancer), breast carcinoma, non-small cell lung cancer (NSCLC), a male genital tract malignancy (e.g., testicular cancer), retroperitoneal or peritoneal carcinoma, gastroesophageal adenocarcinoma, esophagogastric junction carcinoma, liver hepatocellular carcinoma, esophageal and esophagogastric junction carcinoma, cervical cancer, cholangiocarcinoma, pancreatic adenocarcinoma, extrahepatic bile duct adenocarcinoma, a small intestinal malignancy, gastric adenocarcinoma, cancer of unknown primary (CUP), colorectal adenocarcinoma, esophageal carcinoma, prostatic adenocarcinoma, kidney cancer, head and neck squamous carcinoma, thymic carcinoma, non-melanoma skin cancer, thyroid carcinoma (e.g., papillary carcinoma), a head and neck cancer, anal carcinoma, non-epithelial ovarian cancer (non-EOC), uveal melanoma, malignant pleural mesothelioma, small cell lung cancer (SCLC), a central nervous system cancer, a neuroendocrine tumor, and a soft tissue tumor. For example, in certain embodiments, the cancer is breast cancer, non-small cell lung cancer, bladder cancer, kidney cancer, colon cancer, and melanoma.

[0035] In another aspect, the invention provides a method of promoting infiltration of immune cells into a tumor in a subject in need thereof. The method comprises administering to the subject an effective amount of any of the foregoing fusion proteins, any of the foregoing antibody conjugates, or any of the foregoing pharmaceutical compositions. In certain embodiments, the immune cells are T-cells, e.g., CD4+ and/or CD8+ T-cells, e.g., CD69⁺CD8⁺ and/or GzmB⁺CD8⁺ T-cells. In certain embodiments, the immune cells are natural killer (NK) cells.

[0036] In another aspect, the invention provides a method of increasing the number of circulating natural killer (NK) cells in a subject in need thereof. The method comprises administering to the subject an effective amount of any of the foregoing fusion proteins, any of the foregoing antibody conjugates, or any of the foregoing pharmaceutical compositions, so as to increase the number of circulating NK cells relative to prior to administration of the fusion protein, antibody conjugate or pharmaceutical composition.

[0037] In another aspect, the invention provides a method of increasing the number of T-cells in the draining lymph node in subject in need thereof. The method comprises administering to the subject an effective amount of any of the foregoing fusion proteins, any of the foregoing antibody conjugates, or any of the foregoing pharmaceutical compositions, so as to increase the number of T-cells in the draining lymph node relative to prior to administration of the fusion protein, antibody conjugate or pharmaceutical composition. In certain embodiments, the immune cells are T-cells, e.g., CD4+ and/or CD8+ T-cells.

[0038] In another aspect, the invention provides a method of increasing expression of Cd3, Cd4, Cd8, Cd274, Ctla4, Icos, Pdcd1, Lag3, I16, Il1b, 112, Ifng, Ifna1, Mx1, Gzmb, Cxcl9, Cxcl12, and/or Ccl5 in a cell, tissue, or subject. The method comprises contacting the cell, tissue, or subject with an effective amount of any of the foregoing fusion proteins, any of the foregoing antibody conjugates, or any of the foregoing pharmaceutical compositions, so as to increase the expression of Cd3, Cd4, Cd8, Cd274, Ctla4, Icos, Pdcd1, Lag3, I16, Il1b, 112, Ifng, Ifna1, Mx1, Gzmb, Cxcl9, Cxcl12, and/or Ccl5 relative to the cell, tissue or subject prior to contact with the fusion protein, antibody conjugate or pharmaceutical composition.

[0039] These and other aspects and features of the invention are described in the following detailed description and claims.

### DESCRIPTION OF THE DRAWINGS

[0040] The invention can be more completely understood with reference to the following drawings.

[0041] FIGS. 1A-1I depict schematic representations of certain antibody conjugate constructs containing a sialidase enzyme, e.g., a human sialidase enzyme, and an anti-HER2 antigen binding site. For each antibody conjugate construct that contains more than one (e.g., two) sialidase, each sialidase may be the same or different. For each antibody conjugate construct that contains more than one (e.g., two) anti-HER2 antigen binding site, each anti-HER2 antigen binding site may be the same or different. For each antibody conjugate construct that contains an Fc domain, it is understood that the Fc domain can be a wild type Fc domain or can be an engineered Fc domain. For example, the Fc domain may be engineered to contain either a “knob” mutation, e.g., T366Y, or a “hole” mutation, e.g., Y407T, or both, to promote heterodimerization, or the Fc domain may be engineered to contain one or more modifications, e.g., point mutations, to provide any other modified Fc domain functionality.

[0042] FIG. 2 depicts schematic representations of certain antibody conjugate constructs containing a sialidase enzyme, e.g., a human sialidase enzyme, and an anti-HER2 antigen binding site. For each antibody conjugate construct that contains more than one (e.g., two) anti-HER2 antigen binding site, each anti-HER2 antigen binding site may be the same or different. For each antibody conjugate construct that contains an Fc domain, it is understood that the Fc domain can be a wild type Fc domain or can be an engineered Fc domain. For example, the Fc domain may be engineered to contain either a “knob” mutation, e.g., T366Y, or a “hole” mutation, e.g., Y407T, or both, to promote heterodimerization, or the Fc domain may be engineered to contain one or more modifications, e.g., point mutations, to provide any other modified Fc domain functionality.

[0043] FIGS. 3A-3E are schematic representations of exemplary fusion protein conjugates referred to as a Raptor antibody sialidase conjugate (FIG. 3A), a Janus antibody sialidase conjugate (FIG. 3B), a Lobster antibody sialidase conjugate (FIG. 3C), a Bunk antibody sialidase conjugate (FIG. 3D), and a Lobster-Fab antibody sialidase conjugate (FIG. 3E).

[0044] FIG. 4A depicts an SDS-PAGE gel showing recombinant Neu2-M259-Fc under non-reducing and reducing conditions. FIG. 4B is an SEC-HPLC trace of Neu2-M259-Fc.

[0045] FIG. 5A is a line graph showing enzymatic activity of the indicated Neu2-Fc variants as a function of substrate (4-MU-Neu5Ac) concentration. FIG. 5B is a line graph showing enzymatic activity of the indicated Neu2-Fc variants as a function of enzyme concentration.

[0046] FIG. 6 is a line graph depicting thermal stability of the indicated Neu2-Fc variants.

[0047] FIG. 7 is a bar graph depicting enzymatic activity of the indicated Neu2-Fc variants following incubation at 37° C. for the indicated length of time.

[0048] FIG. 8 is an SEC-HPLC trace of Janus Trastuzumab 2.

[0049] FIG. 9 depicts binding to HER2 antigen as determined by ForteBio Octet for Janus Trastuzumab 2.

[0050] FIG. 10 depicts the testing of Janus Trastuzumab 2 in a mouse syngeneic tumor model utilizing EMT6 mouse breast cancer cells engineered to express human HER2, where tumor volume was measured after treatment with an isotype control (FIG. 10A), 1 mg/kg trastuzumab (FIG. 10B), 10 mg/kg trastuzumab (FIG. 10C), 1 mg/kg Janus Trastuzumab 2 (FIG. 10D), or 10 mg/kg Janus Trastuzumab 2 (FIG. 10E), where each line represents an individual mouse, and in FIG. 10F, each line represents the mean tumor volume for the indicated treatment group. Triangles indicate dosing frequency. In FIGS. 10A-E, Complete Responses (CR) and Partial Responses (PR) are indicated.

[0051] FIG. 11 is a line graph showing enzymatic activity of Janus Trastuzumab 2 as a function of substrate (4-MU-Neu5Ac) concentration. Enzyme kinetics (Vmax, Km, and Kcat) are indicated.

[0052] FIG. 12 is a line graph depicting the thermal enzymatic stability of Janus Trastuzumab 2.

[0053] FIGS. 13A-13B are line graphs depicting desialylation of SKBR-3 cells, human cells with high levels of HER2 expression, by Janus Trastuzumab 2 (“Janus”) or Janus LOF, an enzymatically inactive variant. FIG. 13A depicts staining by Hydra 9 following treatment with either Janus Trastuzumab 2 or Janus LOF at the indicated concentrations for 17 hours, where decreased staining is indicative of desialylation. FIG. 13B depicts staining by PNA following treatment with either Janus Trastuzumab 2 or Janus LOF at the indicated concentrations for 17 hours, where increased staining is indicative of desialylation.

[0054] FIGS. 14A-14B are line graphs depicting desialylation of HT-29 cells, human cells with low but detectable levels of HER2 expression, by Janus Trastuzumab 2 (“Janus”) or Janus LOF, an enzymatically inactive variant. FIG. 14A depicts staining by Hydra 9 following treatment with either Janus Trastuzumab 2 or Janus LOF at the indicated concentrations for 17 hours, where decreased staining is indicative of desialylation.

[0055] FIG. 14B depicts staining by PNA following treatment with either Janus Trastuzumab 2 or Janus LOF at the indicated concentrations for 17 hours, where increased staining is indicative of desialylation.

[0056] FIGS. 15A-15C are line graphs depicting ADCC activity mediated by Janus Trastuzumab 2 (“Janus”), Janus LOF, or trastuzumab, at the indicated Effector to Target (E:T) ratios, towards BT-20 cells (FIG. 15A), HT-29 cells (FIG. 15B), or SKBR3 cells (FIG. 15C).

[0057] FIGS. 16A-16C are bar graphs depicting ADCP activity mediated by Janus Trastuzumab 2 (“Janus”), Janus LOF, or trastuzumab, at either 10 pg/mL or 30 pg/mL, as measured by percent killing by phagocytosis of BT-20 cells (FIG. 16A), percent killing by phagocytosis of HT-29 cells (FIG. 16B), or percent killing by phagocytosis of SKBR3 cells (FIG. 16C).

[0058] FIG. 17 depicts testing of Janus Trastuzumab 2 (“Janus”) in a mouse syngeneic tumor model utilizing EMT6 mouse breast cancer cells engineered to express human HER2, where tumor volume was measured after treatment with 10 mg/kg isotype control (FIG. 17A), 5 mg/kg trastuzumab (FIG. 17B), 10 mg/kg Janus LOF (FIG. 17C), 1 mg/kg Janus Trastuzumab 2 (FIG. 17D), 3 mg/kg Janus Trastuzumab 2 (FIG. 17E), or 10 mg/kg Janus Trastuzumab 2 (FIG. 17F). Each line represents an individual mouse, and triangles represent dosing.

[0059] FIG. 18A depicts the average of the tumor volumes from FIG. 17 for the Janus Trastuzumab 2 and Janus LOF treatment groups (both dosed at 10 mg/kg). Triangles represent dosing. **, p<0.05, as determined by One-way ANOVA. FIG. 18B depicts survival curves for the Janus Trastuzumab 2, Janus LOF, and trastuzumab treatment groups. ns, not significant.

[0060] Various features and aspects of the invention are discussed in more detail below.

### DETAILED DESCRIPTION

[0061] The invention is based, in part, upon the discovery that it is possible to produce fusion proteins containing a sialidase enzyme and an anti-HER2 immunoglobulin or a portion thereof, e.g., an antigen-binding domain and/or an immunoglobulin Fc domain, and/or antibody conjugates including a sialidase enzyme and an anti-HER2 antibody or a portion thereof, e.g., an antigen-binding domain and/or an immunoglobulin Fc domain. The sialidase enzyme portion of the fusion protein and/or antibody conjugate may comprise at least one mutation relative to a wild-type sialidase. The mutations, or combination of mutations, can improve the expression, activity or both the expression and activity of the sialidase to improve its use in cancer diagnosis and/or treatment.

[0062] The fusion proteins and/or antibody conjugates have suitable substrate specificities and activities to be useful in removing sialic acid and/or sialic acid containing molecules from the surface of cancer cells, e.g., HER2-expressing cancer cells, and/or removing sialic acid and/or sialic acid containing molecules from the tumor microenvironment, and/or reducing the concentration of sialic acid and/or sialic acid containing molecules in the tumor microenvironment.

[0063] The invention further relates to pharmaceutical compositions and methods of using fusion proteins and/or antibody conjugates to treat cancer.

### I. Sialidase Anti-HER2 Fusion Proteins

[0064] To promote the selective removal of sialic acids on hypersialylated cancer cells, e.g., HER2 expressing cancer cells, and/or in the tumor microenvironment, it may be helpful to target a sialidase as described herein to such a cell or to such a tumor microenvironment. Additionally, in order to promote the removal of sialic acid by a sialidase in a subject, it may be helpful to extend the plasma half-life of the sialidase in the subject. These can be achieved by including the sialidase in a fusion protein and/or antibody conjugate (e.g., a chemically conjugated conjugate).

[0065] Accordingly, the invention further provides fusion proteins comprising a sialidase enzyme, or a functional fragment thereof, and a portion or fragment of an anti-HER2 antibody, such as an immunoglobulin antigen-binding domain (also referred to herein as an antigen-binding domain or an immunoglobulin Fc domain (also referred to herein as an Fc domain). In certain embodiments, the sialidase and anti-HER2 antibody or portion thereof (e.g., antigen-binding domain or immunoglobulin Fc domain) are linked by a peptide bond or an amino acid linker.

[0066] As used herein, unless otherwise indicated, the term “fusion protein” is understood to refer to a single polypeptide chain comprising amino acid sequences based upon two or more separate proteins or polypeptide chains, where the two amino acid sequences may be fused together directly or via an intervening linker sequence, e.g., via an intervening amino acid linker. A nucleotide sequence encoding such a fusion protein can, for example, be created using conventional recombinant DNA technologies.

[0067] In certain embodiments, a fusion protein comprises a tag, such as a Strep tag (e.g., a Strep II tag), a His tag (e.g., a 10× His tag), a myc tag, or a FLAG tag. The tag can be located on the C-terminus or the N-terminus of the fusion protein. a. Sialidase Portion

[0068] As used herein, the term “sialidase” refers to any enzyme, or a functional fragment thereof, that cleaves a terminal sialic acid residue from a substrate, for example, a glycoprotein or a glycolipid. The term sialidase includes variants having one or more amino acid substitutions, deletions, or insertions relative to a wild-type sialidase sequence, and/or fusion proteins or conjugates including a sialidase. Sialidases are also called neuraminidases, and, unless indicated otherwise, the two terms are used interchangeably herein. As used herein, the term “functional fragment” of a sialidase refers to fragment of a full-length sialidase that retains, for example, at least 10%, at least 20%, at least 30%, at least 40%, at least 50%, at least 60%, at least 70%, at least 80%, at least 90%, at least 95%, or 100% of the enzymatic activity of the corresponding full-length, naturally occurring sialidase. Sialidase enzymatic activity may be assayed by any method known in the art, including, for example, by measuring the release of sialic acid from the fluorogenic substrate 4-methylumbelliferyl-N-acetylneuraminic acid (4MU-NeuAc). In certain embodiments, the functional fragment comprises at least 100, 150, 200, 250, 300, 310, 320, 330, 340, 350, 360, or 370 consecutive amino acids present in a full-length, naturally occurring sialidase.

[0069] In certain embodiments, a sialidase portion of a sialidase-anti-HER2 fusion protein is derived from a eukaryotic sialidase, e.g., a mammalian sialidase, e.g., a human or mouse sialidase.

[0070] Four sialidases are encoded in the human genome: Neu1, Neu2, Neu3 and Neu4. Human Neu1 is a lysosomal neuraminidase enzyme which functions in a complex with beta-galactosidase and cathepsin A. The amino acid sequence of human Neu1 is depicted in SEQ ID NO: 7, and a nucleotide sequence encoding human Neu1 is depicted in SEQ ID NO: 23.

[0071] Human Neu2 is a cytosolic sialidase enzyme. The amino acid sequence of human Neu2 is depicted in SEQ ID NO: 1, and a nucleotide sequence encoding human Neu2 is depicted in SEQ ID NO: 24. Unless stated otherwise, as used herein, wild-type human Neu2 refers to human Neu2 having the amino acid sequence of SEQ ID NO: 1.

[0072] Human Neu3 is a plasma membrane sialidase with an activity specific for gangliosides. Human Neu3 has two isoforms: isoform 1 and isoform 2. The amino acid sequence of human Neu3, isoform 1 is depicted in SEQ ID NO: 8, and a nucleotide sequence encoding human Neu3, isoform 1 is depicted in SEQ ID NO: 25. The amino acid sequence of human Neu3, isoform 2 is depicted in SEQ ID NO: 9, and a nucleotide sequence encoding human Neu3, isoform 2 is depicted in SEQ ID NO: 34.

[0073] Human Neu4 has two isoforms: isoform 1 is a peripheral membrane protein and isoform 2 localizes to the lysosome lumen. The amino acid sequence of human Neu4, isoform 1 is depicted in SEQ ID NO: 10, and a nucleotide sequence encoding human Neu4, isoform 1 is depicted in SEQ ID NO: 26. The amino acid sequence of human Neu4, isoform 2 is depicted in SEQ ID NO: 11, and a nucleotide sequence encoding human Neu4, isoform 2 is depicted in SEQ ID NO: 35.

[0074] Four sialidases have also been found in the mouse genome and are referred to as Neu1, Neu2, Neu3 and Neu4. The amino acid sequence of mouse Neu1 is depicted in SEQ ID NO: 38, and a nucleotide sequence encoding mouse Neu1 is depicted in SEQ ID NO: 42. The amino acid sequence of mouse Neu2 is depicted in SEQ ID NO: 39 and a nucleotide sequence encoding mouse Neu2 is depicted in SEQ ID NO: 43. The amino acid sequence of mouse Neu3 is depicted in SEQ ID NO: 40, and a nucleotide sequence encoding mouse Neu3 is depicted in SEQ ID NO: 44. The amino acid sequence of mouse Neu4 is depicted in SEQ ID NO: 41, and a nucleotide sequence encoding mouse Neu4 is depicted in SEQ ID NO: 45.

[0075] In certain embodiments, a sialidase portion of a sialidase-anti-HER2 fusion protein is derived from a prokaryotic sialidase. Exemplary prokaryotic sialidases include sialidases from Salmonella typhimurium and Vibrio cholera. The amino acid sequence of Salmonella typhimurium sialidase (St-sialidase) is depicted in SEQ ID NO: 30, and a nucleotide sequence encoding Salmonella typhimurium sialidase is depicted in SEQ ID NO: 6. The amino acid sequence of Vibrio cholera sialidase is depicted in SEQ ID NO: 36, and a nucleotide sequence encoding Vibrio cholera sialidase is depicted in SEQ ID NO: 37.

[0076] In certain embodiments, the sialidase portion of a sialidase-anti-HER2 fusion protein is a mutant sialidase, e.g., a recombinant mutant human sialidase. In certain embodiments, the recombinant mutant human sialidase has at least about 5%, at least about 10%, at least about 15%, at least about 20%, at least about 25%, at least about 30%, at least about 35%, at least about 40%, at least about 45%, at least about 50%, at least about 55%, at least about 60%, at least about 65%, at least about 70%, at least about 75%, at least about 80%, at least about 85%, at least about 90%, at least about 95%, about 100%, or more than 100% of the enzymatic activity of a corresponding (or template) wild-type human sialidase.

[0077] In certain embodiments, the recombinant mutant human sialidase has about 5%, about 10%, about 15%, about 20%, about 25%, about 30%, about 35%, about 40%, about 45%, about 50%, about 55%, about 60%, about 65%, about 70%, about 75%, about 80%, about 85%, about 90%, about 95%, about 100%, or more than 100% of the enzymatic activity of a corresponding (or template) wild-type human sialidase.

[0078] In certain embodiments, the recombinant mutant human sialidase has the same substrate specificity as the corresponding wild-type human sialidase. In other embodiments, the recombinant mutant human sialidase has a different substrate specificity than the corresponding wild-type human sialidase. For example, in certain embodiments the recombinant mutant human sialidase can cleave a2,3, a2,6, and/or a2,8 linkages. In certain embodiments the sialidase can cleave a2,3 and a2,8 linkages.

[0079] In certain embodiments, the expression yield of the recombinant mutant human sialidase in mammalian cells, e.g., HEK293 cells, CHO cells, murine myeloma cells (e.g., NS0, Sp2/0), or human fibrosarcoma cells (e.g., HT-1080), is greater than about 10%, about 20%, about 50%, about 75%, about 100%, about 150%, about 200%, about 250%, about 300%, about 400%, about 500%, about 600%, about 700%, about 800%, about 900%, or about 1,000% of the expression yield of the corresponding wild-type human sialidase.

[0080] In certain embodiments, the recombinant mutant human sialidase has about 5%, about 10%, about 15%, about 20%, about 25%, about 30%, about 35%, about 40%, about 45%, about 50%, about 55%, about 60%, about 65%, about 70%, about 75%, about 80%, about 85%, about 90%, about 95%, about 100%, or more than 100% of the enzymatic activity of a corresponding wild-type human sialidase, and the expression yield of the recombinant mutant human sialidase in mammalian cells, e.g., HEK293 cells, is greater than about 10%, about 20%, about 50%, about 75%, about 100%, about 150%, about 200%, about 250%, about 300%, about 400%, about 500%, about 600%, about 700%, about 800%, about 900%, or about 1,000% of the expression yield of a corresponding wild-type human sialidase.

[0081] In certain embodiments, the amino acid sequence of the recombinant mutant human sialidase has at least 50%, 55%, 60%, 65%, 70%, 75%, 80%, 85%, 90%, 95%, 96%, 97%, 98%, or 99% sequence identity to the amino acid sequence of a corresponding wild-type human sialidase.

[0082] 1. Substitution of Cysteine Residues

[0083] In certain embodiments, the recombinant mutant human sialidase comprises a substitution of at least one cysteine (cys, C) residue. It has been discovered that certain cysteine residues in sialidases may inhibit expression of functional protein as a result of protein aggregation. Accordingly, in certain embodiments, the recombinant mutant human sialidase contains at least one mutation to remove a free cysteine (e.g., for Neu1 (SEQ ID NO: 7), a mutation of, for example, one or more of C111, C117, C171, C183, C218, C240, C242, and C252; for Neu2 (SEQ ID NO: 1), a mutation of, for example, one or more of C125, C196, C219, C272, C332, and C352; for Neu3 (SEQ ID NO: 8), a mutation of, for example, one or more of C7, C90, C99, C106, C127, C136, C189, C194, C226, C242, C250, C273, C279, C295, C356, C365, C368, C384, C383, C394, and C415; and for Neu4 (SEQ ID NO: 10), a mutation of, for example, one or more of C88, C125, C126, C186, C191, C211, C223, C239, C276, C437, C453, C480, and C481). Free cysteines can be substituted with any amino acid. In certain embodiments, the free cysteine is substituted with serine (ser, S), isoleucine (iso, I), valine (val, V), phenylalanine (phe, F), leucine (leu, L), or alanine (ala, A). Exemplary cysteine substitutions in Neu2 include C125A, C1251, C125S, C125V, C196A, C196L, C196V, C272S, C272V, C332A, C332S, C332V, C352L, and C352V. In certain embodiments, the cysteine at a position corresponding to position 332 of wild-type human Neu2 is substituted by a hydrophobic amino acid, e.g., alanine (C332A), valine (C332V), isoleucine (C332I), or leucine (C332L). In certain embodiments, the cysteine at a position corresponding to position 332 of wild-type human Neu2 is substituted by alanine (C332A).

[0084] In certain embodiments, the recombinant mutant human sialidase comprises two or more cysteine substitutions. Exemplary double or triple cysteine substitutions in Neu2 include: C125S and C332S; C272V and C332A; C272V and C332S; C332A and C352L; C125S and C196L; C196L and C352L; C196L and C332A; C332A and C352L; and C196L, C332A and C352L.

[0085] In certain embodiments, the recombinant mutant human sialidase is a Neu2 sialidase and comprises the substitutions C322A and C352L.

[0086] In certain embodiments, the sialidase contains an amino acid substitution at 2, 3, 4, 5, or 6 cysteines typically present in a human sialidase, e.g., Neu2 or Neu3.

[0087] In certain embodiments, the recombinant mutant human sialidase comprises a substitution or combination of substitutions corresponding to a substitution or combination of substitutions listed in TABLE 1 (amino acid positions corresponding to wild-type human Neu2 (SEQ ID NO: 1)).

TABLE 1
Substitution(s)

C125A
C125I
C125S
C125V
C196A
C196L
C196V
C272S
C272V
C332A
C332S
C332V
C352L
C352V
C125S + C332S
C272V + C332A
C272V + C332S
C332A + C352L
C125S + C196L
C196L + C352L
C196L + C332A
C196L + C332A + C352L

[0088] 2. Substitutions of Residues to Increase pI and/or Decrease Hydrophobicity

[0089] The isoelectric point (pI) of a protein is the pH at which the net charge is zero. The pI also generally indicates the pH at which the protein is least soluble, which may affect the ability to express and purify the protein. Generally, a protein has good solubility if its pI is greater than 2 units above the pH of the solution. Human Neu2 has a predicted pI of 7.5. Thus, human Neu2 is least soluble around neutral pH, which is undesirable because expression and physiological systems are at neutral pH. In contrast, the sialidase from Salmonella typhimurium (St-sialidase), which exhibits good solubility and recombinant expression, has a pI of 9.6. Accordingly, to increase expression of human Neu2 or the other human sialidases, a recombinant mutant human sialidase may be designed to contain one or more amino acid substitution(s) wherein the substitution(s) increase(s) the pI of the sialidase relative to a sialidase without the substitution. Additionally, decreasing the number of hydrophobic amino acids on the surface of a sialidase may improve expression of sialidase by, for example, reducing aggregation. Accordingly, to increase expression of human Neu2 or the other human sialidases, a recombinant mutant human sialidase may be designed to contain one or more amino acid substitution(s) wherein the substitution(s) decrease(s) the hydrophobicity of a surface of the sialidase relative to a sialidase without the substitution(s).

[0090] Accordingly, in certain embodiments, the recombinant mutant human sialidase comprises at least one amino acid substitution, wherein the substitution increases the isoelectric point (pI) of the sialidase and/or decreases the hydrophobicity of the sialidase relative to a sialidase without the substitution. This may be achieved by introducing one or more charged amino acids, for example, positively or negatively charged amino acids, into the recombinant sialidase. In certain embodiments, the amino acid substitution is to a charged amino acid, for example, a positively charged amino acid such as lysine (lys, K), histidine (his, H), or arginine (arg, R), or a negatively charged amino acid such as aspartic acid (asp, D) or glutamic acid (glu, E). In certain embodiments, the amino acid substitution is to a lysine residue. In certain embodiments, the substitution increases the pI of the sialidase to about 7.75, about 8, about 8.25, about 8.5, about 8.75, about 9, about 9.25, about 9.5, or about 9.75.

[0091] In certain embodiments, the amino acid substitution occurs at a surface exposed D or E amino acid, in a helix or loop, or in a position that has a K or R in the corresponding position of St-sialidase. In certain embodiments, the amino acid substitution occurs at an amino acid that is remote from the catalytic site or otherwise not involved in catalysis, an amino acid that is not conserved with the other human Neu proteins or with St-Sialidase or Clostridium NanH, or an amino acid that is not located in a domain important for function (e.g., an Asp-box or beta strand).

[0092] Exemplary amino acid substitutions in Neu2 that increase the isoelectric point (pI) of the sialidase and/or decrease the hydrophobicity of the sialidase relative to a sialidase without the substitution include A2E, A2K, D215K, V325E, V325K, E257K, and E319K. In certain embodiments, the recombinant mutant human sialidase comprises two or more amino acid substitutions, including, for example, A2K and V325E, A2K and V325K, E257K and V325K, A2K and E257K, and E257K and A2K and V325K.

[0093] In certain embodiments, the recombinant mutant human sialidase comprises a substitution or combination of substitutions corresponding to a substitution or combination of substitutions listed in TABLE 2 (amino acid positions corresponding to wild-type human Neu2 (SEQ ID NO. 1)).

TABLE 2
Substitution(s)

A2K
E72K
D215K
E257K
V325K
A2K + E257K
A2K + V325E
A2K + V325K
E257K + V325K

[0094] 3. Addition of N-Terminal Peptides and N- or C-Terminal Substitutions

[0095] It has been discovered that the addition of a peptide sequence of two or more amino acids to the N-terminus of a human sialidase can improve expression and/or activity of the sialidase. In certain embodiments, the peptide is at least 2 amino acids in length, for example, from 2 to 20, from 2 to 10, from 2 to 5, or 2, 3, 4, 5, 6, 7, 8, 9, 10, 11, 12, 13, 14, 15, 16, 17, 18, 19, or 20 amino acids in length. In certain embodiments, the peptide may form, or have a propensity to form, an α-helix.

[0096] In mice, a Neu2 isoform (type B) found in thymus contains six amino acids not present in the canonical isoform of Neu2 found in skeletal muscle. In certain embodiments herein, the N-terminal six amino acids of the mouse thymus Neu2 isoform, MEDLRP (SEQ ID NO: 4), or variations thereof, can be added onto a human Neu, e.g., human Neu2. In certain embodiments, the recombinant mutant human sialidase comprises a peptide at least two amino acid residues in length covalently associated with an N-terminal amino acid of the sialidase. In certain embodiments the recombinant mutant human sialidase comprises the peptide MEDLRP (SEQ ID NO: 4) or EDLRP (SEQ ID NO: 3) covalently associated with an N-terminal amino acid of the sialidase. In certain embodiments, the sialidase may further comprise a cleavage site, e.g., a proteolytic cleavage site, located between the peptide, e.g., MEDLRP (SEQ ID NO: 4) or EDLRP (SEQ ID NO: 3), and the remainder of the sialidase. In certain embodiments, the peptide, e.g., MEDLRP (SEQ ID NO: 4) or EDLRP (SEQ ID NO: 3), may be post-translationally cleaved from the remainder of the sialidase.

[0097] Alternatively to, or in combination with, the N-terminal addition, 1-5 amino acids of the 12 amino acid N-terminal region of the recombinant mutant human sialidase may be removed, e.g., the N-terminal methionine can be removed. In certain embodiments, if the recombinant mutant human sialidase is Neu2, the N-terminal methionine can be removed, the first five amino acids (MASLP; SEQ ID NO: 12) can be removed, or the second through fourth amino acids (ASLP; SEQ ID NO: 13) can be removed.

[0098] In certain embodiments, 1-5 amino acids of the 12 amino acid N-terminal region of the recombinant mutant human sialidase are substituted with MEDLRP (SEQ ID NO: 4), EDLRP (SEQ ID NO: 3), or TVEKSVVF (SEQ ID NO: 14). For example, in certain embodiments, if the recombinant mutant human sialidase is Neu2, the amino acids MASLP (SEQ ID NO: 12), ASLP (SEQ ID NO: 13) or M are substituted with MEDLRP (SEQ ID NO: 4), EDLRP (SEQ ID NO: 3) or TVEKSVVF (SEQ ID NO: 14).

[0099] Human sialidases have a β-propeller structure, characterized by 6 blade-shaped β-sheets arranged toroidally around a central axis. Generally, hydrophobic interactions between the blades of a β-propeller, including between the N- and C-terminal blades, enhance stability. Accordingly, in order to increase expression of human Neu2 or the other human sialidases, a recombinant mutant human sialidase can be designed comprising an amino acid substitution that increases hydrophobic interactions and/or hydrogen bonding between the N- and C-terminal β-propeller blades of the sialidase.

[0100] Accordingly, in certain embodiments, the recombinant mutant human sialidase comprises a substitution of at least one wild-type amino acid residue, wherein the substitution increases hydrophobic interactions and/or hydrogen bonding between the N- and C-termini of the sialidase relative to a sialidase without the substitution. In certain embodiments, the wild-type amino acid is substituted with asparagine (asn, N), lysine (lys, K), tyrosine (tyr, Y), phenylalanine (phe, F), or tryptophan (trp, W). Exemplary substitutions in Neu2 that increase hydrophobic interactions and/or hydrogen bonding between the N- and C-termini include L4N, L4K, V6Y, L7N, L4N and L7N, L4N and V6Y and L7N, V12N, V12Y, V12L, V6Y, V6F, or V6W. In certain embodiments, the valine at a position corresponding to position 6 of wild-type human Neu2 is substituted by an aromatic amino acid, e.g., tryptophan (V6W), tyrosine (V6Y), or phenylalanine (V6F). In certain embodiments, the sialidase comprises the V6Y substitution.

[0101] In certain embodiments, the recombinant mutant human sialidase comprises a combination of the above substitutions. For example, a recombinant mutant human Neu2 sialidase can comprise the additional amino acids MEDLRP (SEQ ID NO: 4), EDLRP (SEQ ID NO: 3), or TVEKSVVF (SEQ ID NO: 14) at the N-terminus and, in combination, can comprise at least one L4N, L4K, V6Y, L7N, L4N and L7N, L4N and V6Y and L7N, V12N, V12Y, V12L, V6Y, V6F, or V6W substitution. In certain embodiments, the amino acids MASLP (SEQ ID NO: 12), ASLP (SEQ ID NO: 13) or M of a recombinant mutant human Neu2 sialidase are replaced with MEDLRP (SEQ ID NO: 4), EDLRP (SEQ ID NO: 3) or TVEKSVVF (SEQ ID NO: 14) and the recombinant mutant human Neu2 sialidase also comprises at least one L4N, L4K, V6Y, L7N, L4N and L7N, L4N and V6Y and L7N, V12N, V12Y, V12L, V6Y, V6F, or V6W substitution.

[0102] In certain embodiments, the recombinant mutant human sialidase comprises a mutation or combination of mutations corresponding to a mutation or combination of mutations listed in TABLE 3 (amino acid positions corresponding to wild-type human Neu2 (SEQ ID NO: 1)).

TABLE 3
Mutation(s)

Substitute M at the N-terminus with EDLRP (SEQ ID NO: 3)
Substitute M at the N-terminus with MEDLRP (SEQ ID NO: 4)
Insert MEDLRP (SEQ ID NO: 4) at the N-terminus
Substitute MASLP (SEQ ID NO: 12) at the N-terminus with
MEDLRP (SEQ ID NO: 4)
L4N
V6Y
L7N
V6F
V6W

[0103] Additionally, in certain embodiments, the sialidase comprises a substitution or deletion of an N-terminal methionine at the N-terminus of the sialidase. For example, in certain embodiments, the sialidase comprises a substitution of a methionine residue at a position corresponding to position 1 of wild-type human Neu2 (SEQ ID NO: 1). In certain embodiments, the methionine at a position corresponding to position 1 of wild-type human Neu2 is substituted by alanine (MIA). In certain embodiments, the methionine at a position corresponding to position 1 of wild-type human Neu2 is substituted by a negatively charged amino acid, e.g., glutamic acid (M1E) or aspartic acid (MID). In certain embodiments, the methionine at a position corresponding to position 1 of wild-type human Neu2 is substituted by aspartic acid (MID). In other embodiments, the sialidase comprises a deletion of a methionine residue at a position corresponding to position 1 (ΔM1) of wild-type human Neu2 (SEQ ID NO: 1).

[0104] In certain embodiments, the recombinant mutant human sialidase comprises a substitution or combination of substitutions corresponding to a substitution or combination of substitutions listed in TABLE 4 (amino acid positions corresponding to wild-type human Neu2 (SEQ ID NO: 1)).

TABLE 4
Mutation(s)

Deletion of M1, V6Y, I187K
M1R, V6Y, I187K
M1H, V6Y, I187K
M1K, V6Y, I187K
M1D, V6Y, I187K
M1T, V6Y, I187K
M1N, V6Y, I187K
M1Q, V6Y, I187K
M1G, V6Y, I187K
M1A, V6Y, I187K
M1V, V6Y, I187K
M1L, V6Y, I187K
M1F, V6Y, I187K
M1Y, V6Y, I187K

[0105] 4. Substitutions of Residues to Decrease Proteolytic Cleavage

[0106] It has been discovered that certain sialidases (e.g., human Neu2) are susceptible to cleavage by a protease (e.g., trypsin). As a result, proteolytic cleavage of the sialidase may occur during recombinant protein production, harvesting, purification, or formulation, during administration to a subject, or after administration to a subject. Accordingly, in certain embodiments, the recombinant mutant sialidase (e.g., human sialidase) comprises a substitution of at least one wild-type amino acid residue, wherein the substitution decreases cleavage of the sialidase by a protease (e.g., trypsin) relative to a sialidase without the substitution.

[0107] In certain embodiments, the protease is a trypsin (e.g., a mammalian trypsin, a bovine trypsin, a human trypsin such as trypsin 1, trypsin 2, or mesotrypsin, a cod trypsin, a Streptomyces griseus trypsin, a Saccharopolyspora erythraeus trypsin, a Streptomyces exfoliatus trypsin, and a Streptomyces albidoflavus trypsin), α-lytic protease, or a serine protease such as kallikreins, elastase and chymotrypsin.

[0108] In certain embodiments, incubation of the recombinant mutant sialidase (e.g., human sialidase) with aprotease (e.g., trypsin) results in from about 1% to about 50%, from about 1% to about 40%, from about 1%, to about 30%, from about 1% to about 20%, from about 1% to about 10%, from about 1% to about 5%, from about 5% to about 50%, from about 5% to about 40%, from about 5% to about 30%, from about 5% to about 20%, from about 5% to about 10%, from about 10% to about 50%, from about 10% to about 40%, from about 10% to about 30%, from about 10% to about 20%, from about 20% to about 50%, from about 20% to about 40%, from about 20% to about 30%, from about 30% to about 50%, from about 30% to about 40%, or from about 40% to about 50% of the proteolytic cleavage of a corresponding sialidase (e.g., wild-type sialidase) without the mutation when incubated with the protease under the same conditions. In certain embodiments, incubation of the recombinant mutant sialidase (e.g., human sialidase) with a protease (e.g., trypsin) results in less than 50%, less than 40%, less than 30%, less than 10%, less than 5%, less than 3%, less than 1%, or less than 0.5% of the proteolytic cleavage of a corresponding sialidase (e.g., wild-type sialidase) without the mutation(s) when incubated with the protease under the same conditions. Proteolytic cleavage can be assayed by any method known in the art, including for example, by SDS-PAGE.

[0109] Exemplary substitutions that increase resistance to proteolytic cleavage include: (i) a substitution of an alanine residue at a position corresponding to position 242 of wild-type human Neu2 (SEQ ID NO: 1), e.g., a substitution by cysteine (A242C), phenylalanine (A242F), glycine (A242G), histidine (A242H), isoleucine (A242I), lysine (A242K), leucine (A242L), methionine (A242M), asparagine (A242N), glutamine (A242Q), arginine (A242R), serine (A242S), valine (A242V), tryptophan (A242W), or tyrosine (A242Y); (ii) a substitution of an arginine residue at a position corresponding to position 243 of wild-type human Neu2 (SEQ ID NO: 1), e.g., a substitution by glutamic acid (R243E), histidine (R243H), asparagine (R243N), glutamine (R243Q), or lysine (R243K); (iii) a substitution of a valine residue at a position corresponding to position 244 of wild-type human Neu2 (SEQ ID NO: 1), e.g., a substitution by isoleucine (V244I), lysine (V244K), or proline (V244P); or (iv) a combination of any of the foregoing. In certain embodiments, the alanine at a position corresponding to position 242 of wild-type human Neu2 is substituted by an aromatic amino acid, e.g., tryptophan (A242W), tyrosine (A242Y), or phenylalanine (A242F). In certain embodiments, the alanine at a position corresponding to position 242 of wild-type human Neu2 is substituted by cysteine (A242C). In certain embodiments, the recombinant mutant human sialidase or the recombinant non-human sialidase comprises a substitution or combination of substitutions corresponding to a substitution or combination of substitutions listed in TABLE 5 (amino acid positions corresponding to wild-type human Neu2 (SEQ ID NO: 1)).

TABLE 5

| Wild Type Human Neu2 | Exemplary Substitution(s) at |
|---|---|
| (SEQ ID NO: 1) Amino Acid | Specified Position(s) |
| A242 | C, F, G, H, I, K, L, M, N, P, Q, R, |
| | S, V, W, Y |
| R243 | E, H, N, Q, K |
| V244 | I, K, P |

[0110] Additional exemplary substitutions that increase resistance to proteolytic cleavage (and/or increase expression yield and/or enzymatic activity) include: (i) a substitution of a leucine residue at a position corresponding to position 240 of wild-type human Neu2 (SEQ ID NO: 1), e.g., a substitution by aspartic acid (L240D), asparagine (L240N), or tyrosine (L240Y); (ii) a substitution of an alanine residue at a position corresponding to position 213 of wild-type human Neu2 (SEQ ID NO: 1), e.g., a substitution by cysteine (A213C), asparagine (A213N), serine (A213S), orthreonine (A213T); (iii) a substitution of an arginine residue at a position corresponding to position 241 of wild-type human Neu2 (SEQ ID NO: 1), e.g., a substitution by alanine (R241A), aspartic acid (R241D), leucine (R241L), glutamine (R241Q), or tyrosine (R241Y); (iv) a substitution of a serine residue at a position corresponding to position 258 of wild-type human Neu2 (SEQ ID NO: 1), e.g., a substitution by cysteine (S258C); (v) a substitution of a leucine residue at a position corresponding to position 260 of wild-type human Neu2 (SEQ ID NO: 1), e.g., a substitution by aspartic acid (L260D), phenylalanine (L260F), glutamine (L260Q), or threonine (L260T); (vi) a substitution of a valine residue at a position corresponding to position 265 of wild-type human Neu2 (SEQ ID NO: 1), e.g., a substitution by phenylalanine (V265F); or (vii) a combination of any of the foregoing. It is contemplated that, in certain embodiments, a substitution or a combination of substitutions at these positions may improve hydrophobic and/or aromatic interaction between secondary structure elements in the sialidase (e.g., between an α-helix and the nearest α-sheet) thereby stabilizing the structure and improving resistance to proteolytic cleavage.

[0111] In certain embodiments, the recombinant mutant sialidase or the recombinant non-human sialidase comprises a mutation at position L240. In certain embodiments, the recombinant mutant sialidase comprises a combination of mutations at positions (i) A213 and A242, (ii) A213, A242, and S258, (iii) L240 and L260, (iv) R241 and A242, (v) A242 and L260, (vi) A242 and V265, or (vii) L240 and A242. In certain embodiments, the recombinant mutant human sialidase comprises a combination of substitutions selected from (i) A213C, A242F, and S258C, (ii) A213C and A242F, (iii) A213T and A242F, (iv) R241Y and A242F, and (v) L240Y and A242F. In certain embodiments, the recombinant mutant human sialidase or the recombinant non-human sialidase comprises a substitution or combination of substitutions corresponding to a substitution or combination of substitutions listed in TABLE 6 (amino acid positions corresponding to wild-type human Neu2 (SEQ ID NO: 1)).

TABLE 6
Substitution(s)

A242C, V244P
A242R, V244R
A242R, V244H
A242Y, V244P
A242T, V244P
A242N, V244P
A213C, A242F
A213S, A242F
A213T, A242F
A213N, A242F
A213C, A242F, S258C
A242F, L260F
A242F, V265F
L240Y
L240Y, L260F
L240D, L260T
L240N, L260T
L240N, L260D
L240N, L260Q
L240Y, A242F
R241A, A242F
R241Y, A242F

[0112] 5. Other Substitutions

[0113] In certain embodiments, the recombinant mutant human sialidase comprises at least one of the following substitutions: A328E, K370N, or H210N. In certain embodiments, the isoleucine at a position corresponding to position 187 of wild-type human Neu2 is substituted by a positively charged amino acid, e.g., lysine (I187K) or arginine (I187K). In certain embodiments, the isoleucine at a position corresponding to position 187 of wild-type human Neu2 is substituted by lysine (I187K). In certain embodiments, a recombinant mutant human Neu2 comprises the substitution of the amino acids GDYDAPTHQVQW (SEQ ID NO: 15) with the amino acids SMDQGSTW (SEQ ID NO: 16) or STDGGKTW (SEQ ID NO: 17). In certain embodiments, a recombinant mutant human Neu2 comprises the substitution of the amino acids PRPPAPEA (SEQ ID NO: 18) with the amino acids QTPLEAAC (SEQ ID NO: 19). In certain embodiments, a recombinant mutant human Neu2 comprises the substitution of the amino acids NPRPPAPEA (SEQ ID NO: 20) with the amino acids SQNDGES (SEQ ID NO: 21).

[0114] In certain embodiments, the recombinant mutant human sialidase comprises at least one substitution at a position corresponding to V212, A213, Q214, D215, T216, L217, E218, C219, Q220, V221, A222, E223, V224, E225, or T225.

[0115] In certain embodiments, the recombinant mutant human sialidase comprises an amino acid substitution at a position identified in TABLE 7 (amino acid positions corresponding to wild-type human Neu2 (SEQ ID NO: 1). In certain embodiments, the sialidase comprises an amino acid substitution identified in TABLE 7. In certain embodiments, the sialidase comprises a combination of any amino acid substitutions identified in TABLE 7.

TABLE 7

| Wild Type Human Neu2 | Exemplary Substitution(s) at |
|---|---|
| (SEQ ID NO: 1) Amino Acid | Specified Position(s) |
| M1 | D |
| LA | S, T, Y, L, F, A, P, V, I, N, D, or H |
| P5 | G |
| V6 | Y |
| L7 | F, Y, S, I, T, or N |
| K9 | D |
| V12 | L, A, P, V, N, D, or H |
| F13 | S, N, R, K, T, G, D, E, or A |
| I22 | S, N, R, K, T, G, D, E, A, Y, L, F, P, |
| | V, I, or H |
| A24 | S, N, R, K, T, G, D, E, A, Y, L, F, P, |
| | V, I, or H |
| L34 | S, T, Y, L, F, A, P, V, I, N, D, or H |
| A36 | S, T, Y, L, F, A, P, V, I, N, D, or H |
| A42 | R or D |
| K44 | R or E |
| K45 | A, E, or R |
| L54 | M |
| P62 | H, G, N, T, S, F, I, D, or E |
| H64 | F, Y, S, I, T, or N |
| Q69 | H |
| R78 | K |
| D80 | P |
| P89 | S, T, Y, L, F, A, P, V, I, N, D, H, or M |
| A93 | E or K |
| G107 | D |
| Q108 | H |
| Q112 | E, R, or K |
| C125 | Y, F, or L |
| Q126 | E, F, H, I, L, or Y |
| A150 | V |
| T156 | R, N, D, C, G, H, I, L, F, S, Y, V, A, |
| | P, or T |
| F157 | R, N, D, C, G, H, I, L, F, S, Y, V, A, |
| | or P |
| A158 | R, N, D, C, G, H, I, L, F, S, Y, V, A, |
| | P, or T |
| V159 | R, N, D, C, G, H, I, L, F, S, Y, V, A, |
| | or P |
| G160 | R, N, D, C, G, H, I, L, F, S, Y, V, A, |
| | P, or T |
| P161 | R, N, D, C, G, H, I, L, F, S, Y, V, A, |
| | or P |
| G162 | R, N, D, C, G, H, I, L, F, S, Y, V, A, |
| | P, or T |
| H163 | R, N, D, C, G, H, I, L, F, S, Y, V, A, |
| | or P |
| C164 | R, N, D, C, G, H, I, L, F, S, Y, V, A, |
| | P, or T |
| L165 | R, N, D, C, G, H, I, L, F, S, Y, V, A, |
| | or P |
| R170 | P |
| A171 | G |
| V176 | R, N, D, C, G, H, I, L, F, S, Y, V, P, |
| | or A |
| P177 | S, T, Y, L, F, A, P, V, I, N, D, or H |
| A178 | S, T, Y, L, F, A, P, V, I, N, D, or H |
| L184 | S, N, R, K, T, G, D, E, A, F, H, I, L, |
| | P, V, or Y |
| H185 | S, N, R, K, T, G, D, E, or A |
| P186 | S, N, R, K, T, G, D, E, A, F, H, I, L, |
| | P, V, or Y |
| I187 | S, N, R, K, T, G, D, E, or A |
| Q188 | P, S, N, R, K, T, G, D, E, or A |
| R189 | P |
| P190 | F, M, A, D, G, H, N, P, R, S, or T |
| I191 | M, A, D, F, H, I, L, N, P, S, T, V, Y, |
| | E, G, K, or R |
| A194 | S, T, Y, L, F, A, P, V, I, N, D, or H |
| A213 | C, N, S, or T |
| L217 | R, N, D, C, G, H, I, L, F, S, Y, or V |
| C219 | R, N, D, C, G, H, I, L, F, S, Y, or V |
| A222 | D |
| E225 | P or C |
| H239 | P |
| L240 | D, N, or Y |
| R241 | A, D, L, Q, or Y |
| A242 | C, F, G, H, I, K, L, M, N, Q, R, S, V, |
| | W, or Y |
| V244 | I or P |
| T249 | A |
| D251 | G |
| E257 | P |
| S258 | C |
| L260 | D, F, Q, or T |
| V265 | F |
| Q270 | S, T, A, H, P, or F |
| G271 | S, N, R, K, T, G, D, E, or A |
| C272 | S, N, R, K, T, G, D, E, A, C, H, Y, F, |
| | H, L, P, or V |
| A290 | C |
| W292 | R |
| S301 | A, D, E, F, G, H, I, K, L, M, N, P, Q, |
| | T, V, W, Y, C, or R |
| W302 | A, D, E, F, G, H, I, L, M, N, P, Q, R, |
| | S, T, V, Y, or K |
| E319 | D |
| V325 | F, Y, S, I, T, N, A, D, H, L, P, or V |
| L326 | F, Y, S, I, T, N, A, D, H, L, P, or V |
| L327 | F, Y, S, I, T, N, A, D, H, L, P, or V |
| C332 | A, D, G, H, N, P, R, S, or T |
| Y359 | A or S |
| V363 | R, S, T, Y, L, F, A, P, V, I, N, D, or H |
| L365 | K, Q, F, Y, S, I, T, N, A, D, H, L, P, |
| | or V |

[0116] For example, in certain embodiments, the recombinant mutant human sialidase comprises: (a) a substitution of a proline residue at a position corresponding to position 5 of wild-type human Neu2 (P5); (b) a substitution of a lysine residue at a position corresponding to position 9 of wild-type human Neu2 (K9); (c) a substitution of an alanine residue at a position corresponding to position 42 of wild-type human Neu2 (A42); (d) a substitution of a lysine residue at a position corresponding to position 44 of wild-type human Neu2 (K44); (e) a substitution of a lysine residue at a position corresponding to position 45 of wild-type human Neu2 (K45); (f) a substitution of a leucine residue at a position corresponding to position 54 of wild-type human Neu2 (L54); (g) a substitution of a proline residue at a position corresponding to position 62 of wild-type human Neu2 (P62); (h) a substitution of a glutamine residue at a position corresponding to position 69 of wild-type human Neu2 (Q69); (i) a substitution of an arginine residue at a position corresponding to position 78 of wild-type human Neu2 (R78); (j) a substitution of an aspartic acid residue at a position corresponding to position 80 of wild-type human Neu2 (D80); (k) a substitution of an alanine residue at a position corresponding to position 93 of wild-type human Neu2 (A93); (1) a substitution of a glycine residue at a position corresponding to position 107 of wild-type human Neu2 (G107); (m) a substitution of a glutamine residue at a position corresponding to position 108 of wild-type human Neu2 (Q108); (n) a substitution of a glutamine residue at a position corresponding to position 112 of wild-type human Neu2 (Q112); (o) a substitution of a cysteine residue at a position corresponding to position 125 of wild-type human Neu2 (C125); (p) a substitution of a glutamine residue at a position corresponding to position 126 of wild-type human Neu2 (Q126); (q) a substitution of an alanine residue at a position corresponding to position 150 of wild-type human Neu2 (A150); (r) a substitution of a cysteine residue at a position corresponding to position 164 of wild-type human Neu2 (C164); (s) a substitution of an arginine residue at a position corresponding to position 170 of wild-type human Neu2 (R170); (t) a substitution of an alanine residue at a position corresponding to position 171 of wild-type human Neu2 (A171); (u) a substitution of a glutamine residue at a position corresponding to position 188 of wild-type human Neu2 (Q188); (v) a substitution of an arginine residue at a position corresponding to position 189 of wild-type human Neu2 (R189); (w) a substitution of an alanine residue at a position corresponding to position 213 of wild-type human Neu2 (A213); (x) a substitution of a leucine residue at a position corresponding to position 217 of wild-type human Neu2 (L217); (y) a substitution of a glutamic acid residue at a position corresponding to position 225 of wild-type human Neu2 (E225); (z) a substitution of a histidine residue at a position corresponding to position 239 of wild-type human Neu2 (H239); (aa) a substitution of a leucine residue at a position corresponding to position 240 of wild-type human Neu2 (L240); (bb) a substitution of an arginine residue at a position corresponding to position 241 of wild-type human Neu2 (R241); (cc) a substitution of an alanine residue at a position corresponding to position 242 of wild-type human Neu2 (A242); (dd) a substitution of a valine residue at a position corresponding to position 244 of wild-type human Neu2 (V244); (ee) a substitution of a threonine residue at a position corresponding to position 249 of wild-type human Neu2 (T249); (ff) a substitution of an aspartic acid residue at a position corresponding to position 251 of wild-type human Neu2 (D251); (gg) a substitution of a glutamic acid residue at a position corresponding to position 257 of wild-type human Neu2 (E257); (hh) a substitution of a serine residue at a position corresponding to position 258 of wild-type human Neu2 (S258); (ii) a substitution of a leucine residue at a position corresponding to position 260 of wild-type human Neu2 (L260); (jj) a substitution of a valine residue at a position corresponding to position 265 of wild-type human Neu2 (V265); (kk) a substitution of a glutamine residue at a position corresponding to position 270 of wild-type human Neu2 (Q270); (11) a substitution of an alanine residue at a position corresponding to position 290 of wild-type human Neu2 (A290); (mm) a substitution of a tryptophan residue at a position corresponding to position 292 of wild-type human Neu2 (W292); (nn) a substitution of a serine residue at a position corresponding to position 301 of wild-type human Neu2 (S301); (oo) a substitution of a tryptophan residue at a position corresponding to position 302 of wild-type human Neu2 (W302); (pp) a substitution of a valine residue at a position corresponding to position 363 of wild-type human Neu2 (V363); or (qq) a substitution of a leucine residue at a position corresponding to position 365 of wild-type human Neu2 (L365); or a combination of any of the foregoing substitutions. For example, the sialidase may comprise a substitution of K9, A42, P62, A93, Q216, A242, Q270, S301, W302, V363, or L365, or a combination of any of the foregoing substitutions.

[0117] In certain embodiments, in the sialidase: (a) the proline residue at a position corresponding to position 5 of wild-type human Neu2 is substituted by histidine (P5H); (b) the lysine residue at a position corresponding to position 9 of wild-type human Neu2 is substituted by aspartic acid (K9D); (c) the alanine residue at a position corresponding to position 42 of wild-type human Neu2 is substituted by a positively charged amino acid, e.g., arginine (A42R) or lysine (A42K), or is substituted by aspartic acid (A42D); (d) the lysine residue at a position corresponding to position 44 of wild-type human Neu2 is substituted by arginine (K44R) or glutamic acid (K44E); (e) the lysine residue at a position corresponding to position 45 of wild-type human Neu2 is substituted by alanine (K45A), arginine (K45R), or glutamic acid (K45E); (f) the leucine residue at a position corresponding to position 54 of wild-type human Neu2 is substituted by methionine (L54M); (g) the proline residue at a position corresponding to position 62 of wild-type human Neu2 is substituted by asparagine (P62N), aspartic acid (P62D), histidine (P62H), glutamic acid (P62E), glycine (P62G), serine (P62S), or threonine (P62T); (h) the glutamine residue at a position corresponding to position 69 of wild-type human Neu2 is substituted by histidine (Q69H); (i) the arginine residue at a position corresponding to position 78 of wild-type human Neu2 is substituted by lysine (R78K); (j) the aspartic acid residue at a position corresponding to position 80 of wild-type human Neu2 is substituted by proline (D80P); (k) the alanine residue at a position corresponding to position 93 of wild-type human Neu2 is substituted by a negatively charged amino acid, e.g., aspartic acid (A93D) or glutamic acid (A93E), or is substituted by lysine (A93K); (l) the glycine residue at a position corresponding to position 107 of wild-type human Neu2 is substituted by aspartic acid (G107D); (m) the glutamine residue at a position corresponding to position 108 of wild-type human Neu2 is substituted by histidine (Q108H); (n) the glutamine residue at a position corresponding to position 112 of wild-type human Neu2 is substituted by glutamic acid (Q112E), arginine (Q112R), or lysine (Q112K); (o) the cysteine residue at a position corresponding to position 125 of wild-type human Neu2 is substituted by leucine (C125L); (p) the glutamine residue at a position corresponding to position 126 of wild-type human Neu2 is substituted by an aromatic amino acid, e.g., phenylalanine (Q126F), tyrosine (Q126Y), or tryptophan (Q126W), or is substituted by leucine (Q126L), glutamic acid (Q126E), histidine (Q126H), or isoleucine (Q1261); (q) the alanine residue at a position corresponding to position 150 of wild-type human Neu2 is substituted by valine (A150V); (r) the cysteine residue at a position corresponding to position 164 of wild-type human Neu2 is substituted by glycine (C164G); (s) the arginine residue at a position corresponding to position 170 of wild-type human Neu2 is substituted by proline (R170P); (t) the alanine residue at a position corresponding to position 171 of wild-type human Neu2 is substituted by glycine (A171G); (u) the glutamine residue at a position corresponding to position 188 of wild-type human Neu2 is substituted by proline (Q188P); (v) the arginine residue at a position corresponding to position 189 of wild-type human Neu2 is substituted by proline (R189P); (w) the alanine residue at a position corresponding to position 213 of wild-type human Neu2 is substituted by cysteine (A213C), asparagine (A213N), serine (A213S), or threonine (A213T); (x) the leucine residue at a position corresponding to position 217 of wild-type human Neu2 is substituted by alanine (L217A) or valine (L217V); (y) the threonine residue at a position corresponding to position 249 of wild-type human Neu2 is substituted by alanine (T249A); (z) the aspartic acid residue at a position corresponding to position 251 of wild-type human Neu2 is substituted by glycine (D251G); (aa) the glutamic acid residue at a position corresponding to position 225 of wild-type human Neu2 is substituted by cysteine (E225C) or proline (E225P); (bb) the histidine residue at a position corresponding to position 239 of wild-type human Neu2 is substituted by proline (H239P); (cc) the leucine residue at a position corresponding to position 240 of wild-type human Neu2 is substituted by aspartic acid (L240D), asparagine (L240N), or tyrosine (L240Y); (dd) the arginine residue at a position corresponding to position 241 of wild-type human Neu2 is substituted by alanine (R241A), aspartic acid (R241D), leucine (R241L), glutamine (R241Q), or tyrosine (R241Y); (ee) the alanine residue at a position corresponding to position 242 of wild-type human Neu2 is substituted by cysteine (A242C), phenylalanine (A242F), glycine (A242G), histidine (A242H), isoleucine (A242I), lysine (A242K), leucine (A242L), methionine (A242M), asparagine (A242N), glutamine (A242Q), arginine (A242R), serine (A242S), valine (A242V), tryptophan (A242W), or tyrosine (A242Y); (ff) the valine residue at a position corresponding to position 244 of wild-type human Neu2 is substituted by isoleucine (V244I), lysine (V244K), or proline (V244P); (gg) the glutamic acid residue at a position corresponding to position 257 of wild-type human Neu2 is substituted by proline (E257P); (hh) the serine residue at a position corresponding to position 258 is substituted by cysteine (S258C); (ii) the leucine residue at a position corresponding to position 260 of wild-type human Neu2 is substituted by aspartic acid (L260D), phenylalanine (L260F), glutamine (L260Q), or threonine (L260T); (jj) the valine residue at a position corresponding to position 265 of wild-type human Neu2 is substituted by phenylalanine (V265F); (kk) the glutamine residue at a position corresponding to position 270 of wild-type human Neu2 is substituted by a polar, uncharged amino acid, e.g., serine (Q270S) or threonine (Q270T), or is substituted by alanine (Q270A), histidine (Q270H), phenylalanine (Q270F), or proline (Q270P); (11) the alanine residue at a position corresponding to position 290 of wild-type human Neu2 is substituted by cysteine (A290C); (mm) the tryptophan residue at a position corresponding to position 292 of wild-type human Neu2 is substituted by arginine (W292R); (nn) the serine residue at a position corresponding to position 301 of wild-type human Neu2 is substituted by alanine (S301A), aspartic acid (S301D), glutamic acid (S301E), phenylalanine (S301F), histidine (S301H), lysine (S301K), leucine (S301L), methionine (S301M), asparagine (S301N), proline (S301P), glutamine (S301Q), arginine (S301R), threonine (S301T), valine (S301V), tryptophan (S301W), or tyrosine (S301Y)); (oo) the tryptophan residue at a position corresponding to position 302 of wild-type human Neu2 is substituted by alanine (W302A), aspartic acid (W302D), phenylalanine (W302F), glycine (W302G), histidine (W302H), isoleucine (W302I), lysine (W302K), leucine (W302L), methionine (W302M), asparagine (W302N), proline (W302P), glutamine (W302Q), arginine (W302R), serine (W302S), threonine (W302T), valine (W302V), or tyrosine (W302Y); (pp) the valine residue at a position corresponding to position 363 of wild-type human Neu2 is substituted by arginine (V363R); or (qq) the leucine residue at a position corresponding to position 365 of wild-type human Neu2 is substituted by glutamine (L365Q), histidine (L365H), isoleucine (L365I), lysine (L365K) or serine (L365S); or the sialidase comprises a combination of any of the foregoing substitutions. For example, the sialidase may comprise a substitution selected from K9D, A42R, P62G, P62N, P62S, P62T, A93E, Q126Y, A242F, A242W, A242Y, Q270A, Q270T, S301A, S301R, W302K, W302R, V363R, and L365I, or a combination of any of the foregoing substitutions.

[0118] In certain embodiments, the recombinant mutant human sialidase comprises a deletion of a leucine residue at a position corresponding to position 184 of wild-type human Neu2 (ΔL184), a deletion of a histidine residue at a position corresponding to position 185 of wild-type human Neu2 (ΔH185), a deletion of a proline residue at a position corresponding to position 186 of wild-type human Neu2 (ΔP186), a deletion of an isoleucine residue at a position corresponding to position 187 of wild-type human Neu2 (ΔI187), and a deletion of a glutamine residue at a position corresponding to position 184 of wild-type human Neu2 (ΔQ188), or a combination of any of the foregoing deletions.

[0119] In certain embodiments, the recombinant mutant human sialidase comprises an insertion between a threonine residue at a position corresponding to position 216 of wild-type human Neu2 and a leucine residue at a position corresponding to position 217 of wild-type human Neu2, for example, an insertion of an amino acid selected from S, T, Y, L, F, A, P, V, I, N, D, and H.

[0120] Additional exemplary sialidase mutations, and combinations of sialidase mutations, are described in International (PCT) Patent Application Publication No. WO 2019/136167, including in the Detailed Description in the section entitled “I. Recombinant Human Sialidases,” and in the Examples in Examples 1, 2, 3, 4, 5, and 6, and International (PCT) Patent Application Publication No. WO 2021/003469, filed Jul. 3, 2020, including in the Detailed Description in the section entitled “I. Recombinant Human Sialidases,” and in the Examples in Examples 2, 3, 4, and 5, and in International (PCT) Patent Application No. PCT/US2021/040240, filed Jul. 2, 2021, including in the Detailed Description in the section entitled “I. Recombinant Human Sialidases,” and in the Examples in Examples 2, 3, 4, 5, and 11.

[0121] 6. Combinations of Substitutions

[0122] In certain embodiments, the recombinant mutant human sialidase comprises a combination of any of the mutations contemplated herein. For example, the recombinant mutant sialidase enzyme may comprise a combination of 2, 3, 4, 5, 6, 7, 8, 9, 10, 11, 12, 13, 14, 15 or more of the mutations contemplated herein. It is contemplated that the recombinant mutant sialidase enzyme may comprise 1-15, 1-10, 1-7, 1-6, 1-5, 1-4, 1-3, 1-2, 2-15, 2-10, 2-7, 2-6, 2-5, 2-4, 2-3, 3-15, 3-10, 3-7, 3-6, 3-5, or 3-4 of the mutations contemplated herein.

[0123] For example, the recombinant mutant sialidase enzyme may comprise an M1 deletion (ΔM1), MIA substitution, MID substitution, V6Y substitution, K9D substitution, P62G substitution, P62N substitution, P62S substitution, P62T substitution, A93E substitution, I187K substitution, Q270A substitution, S301R substitution, W302K substitution, C332A substitution, V363R substitution, L365I substitution, or a combination of any of the foregoing.

[0124] In certain embodiments, the recombinant mutant sialidase enzyme comprises a M1 deletion (ΔM1), MIA substitution, MID substitution, V6Y substitution, I187K substitution, C332A substitution, or a combination of any of the foregoing. For example, the recombinant mutant sialidase enzyme may comprise a combination of mutations selected from: MIA and V6Y; MIA and I187K; MIA and C332A; MID and V6Y; MID and I187K; MID and C332A; ΔM1 and V6Y; ΔM1 and I187K; ΔM1 and C332A; V6Y and I187K; V6Y and C332A; I187K and C332A; MIA, V6Y, and I187K; MIA, V6Y, and C332A; MIA, I187K, and C332A; MID, V6Y, and I187K; MID, V6Y, and C332A; MID, I187K, and C332A; ΔM1, V6Y, and I187K; ΔM1, V6Y, and C332A; ΔM1, I187K, and C332A; V6Y, I187K, and C332A; MIA, V6Y, I187K, and C332A; MID, V6Y, I187K, and C332A; and ΔM1, V6Y, I187K, and C332A.

[0125] In certain embodiments, the recombinant mutant sialidase enzyme comprises (i) an amino acid substitution identified in TABLE 7, or a combination of any amino acid substitutions identified in TABLE 7, and (ii) an M1 deletion (ΔM1), MIA substitution, MID substitution, V6Y substitution, I187K substitution, C332A substitution, or a combination of any of the foregoing. For example, the recombinant mutant sialidase enzyme may comprise (i) an amino acid substitution identified in TABLE 7, or a combination of any amino acid substitutions identified in TABLE 7, and (ii) a combination of mutations selected from: MIA and V6Y; MIA and I187K; MIA and C332A; MID and V6Y; MID and I187K; MID and C332A; ΔM1 and V6Y; ΔM1 and I187K; ΔM1 and C332A; V6Y and I187K; V6Y and C332A; I187K and C332A; MIA, V6Y, and I187K; MIA, V6Y, and C332A; MIA, I187K, and C332A; MID, V6Y, and I187K; MID, V6Y, and C332A; MID, I187K, and C332A; ΔM1, V6Y, and I187K; ΔM1, V6Y, and C332A; ΔM1, I187K, and C332A; V6Y, I187K, and C332A; MIA, V6Y, I187K, and C332A; MID, V6Y, I187K, and C332A; and ΔM1, V6Y, I187K, and C332A.

[0126] In certain embodiments, the recombinant mutant sialidase enzyme comprises: (a) the MID, V6Y, P62G, A93E, I187K, and C332A substitutions; (b) the MID, V6Y, K9D, A93E, I187K, C332A, V363R, and L365I substitutions; (c) the MID, V6Y, P62N, I187K, and C332A substitutions; (d) the MID, V6Y, I187K, Q270A, S301R, W302K, and C332A substitutions; (e) the MID, V6Y, P62S, I187K, Q270A, S301R, W302K, and C332A substitutions; (f) the MID, V6Y, P62T, I187K, Q270A, S301R, W302K, and C332A substitutions; (g) the MID, V6Y, P62N, I187K, Q270A, S301R, W302K, and C332A substitutions; (h) the MID, V6Y, P62G, A93E, I187K, S301A, W302R, and C332A substitutions; (i) the MID, V6Y, P62G, A93E, Q126Y, I187K, Q270T, and C332A substitutions; (j) the MID, V6Y, P62G, A93E, Q126Y, I187K, and C332A substitutions; (k) the MID, V6Y, P62G, A93E, Q126Y, I187K, A242F, Q270T, and C332A substitutions; (1) the MID, V6Y, A42R, P62G, A93E, Q126Y, I187K, A242F, Q270T, and C332A substitutions; (m) the MID, V6Y, P62G, A93E, Q112E, Q126Y, I187K, Q270T, A242F, and C332A; or (n) the MID, V6Y, P62G, A93E, Q126Y, I187K, E225C, Q270T, A290C, A242F, C332A substitutions.

[0127] In certain embodiments, the recombinant mutant human sialidase further comprises a substitution of a serine residue at a position corresponding to position 301 of wild-type human Neu2 (S301) in combination with a substitution of a tryptophan residue at a position corresponding to position 302 of wild-type human Neu2 (W302). For example, the recombinant mutant human sialidase may comprise a combination of substitutions corresponding to a combination of substitutions listed in a row of TABLE 8 (amino acid positions corresponding to wild-type human Neu2 (SEQ ID NO: 1)). For example, the recombinant mutant human sialidase may comprise: the S301K and W302R substitutions; the S301K and W302K substitutions; or the S301A and W302S substitutions.

TABLE 8
Substitutions

S301A, W302R
S301A, W302S
S301A, W302T
S301K, W302S
S301N, W302S
S301T, W302S
S301T, W302T
S301T, W302R
S301A, W302A
S301K, W302R
S301K, W302T
S301N, W302T
S301K, W302K
S301P, W302R
S301P, W302S
S301P, W302T

[0128] In certain embodiments, the recombinant mutant human sialidase further comprises a combination of substitutions corresponding to a combination of substitutions listed in a row of TABLE 9 (amino acid positions corresponding to wild-type human Neu2 (SEQ ID NO: 1)).

TABLE 9
Substitutions

M1D, V6Y, P62G, I187K, C332A
M1D, V6Y, K9D, I187K, C332A, V363R, L365I
M1D, V6Y, P62G, A93E, I187K, C332A
M1D, V6Y, K9D, I187K, C332A, V363R, L365K
M1D, V6Y, K9D, I187K, C332A, V363R, L365S
M1D, V6Y, K9D, I187K, C332A, V363R, L365Q
M1D, V6Y, K9D, I187K, C332A, V363R, L365H
M1D, V6Y, A93K, I187K, C332A
M1D, V6Y, A93E, I187K, C332A
V6Y, I187K, W292R
V6Y, G107D, I187K
V6Y, C125L
C125L, I187K
V6Y, C125L, I187K
M1D, V6Y, K45A, I187K, C332A
M1D, V6Y, Q270A, I187K, C332A
M1D, V6Y, K44R, K45R, I187K, C332A
M1D, V6Y, Q112R, I187K, C332A
M1D, V6Y, Q270F, I187K, C332A
M1D, V6Y, I187K, S301R, W302K, C332A
M1D, V6Y, K44E, K45E, I187K, C332A
M1D, V6Y, I187K, L217V, C332A
M1D, V6Y, I187K, L217A, C332A
M1D, V6Y, K44E, K45E, I187K, S301R, W302K, C332A
M1D, V6Y, Q112R, I187K, S301R, W302K, C332A
M1D, V6Y, I187K, Q270A, S301R, W302K, C332A
M1D, V6Y, K44E, K45E, Q112R, I187K, C332A
M1D, V6Y, K44E, K45E, I187K, Q270A, C332A
M1D, V6Y, K45A, I187K, Q270A, C332A
M1D, V6Y, I187K, Q270H, C332A
M1D, V6Y, I187K, Q270P, C332A
M1D, V6Y, Q112K, I187K, C332A
M1D, V6Y, P62S, I187K, Q270A, S301R, W302K, C332A
M1D, V6Y, P62T, I187K, Q270A, S301R, W302K, C332A
M1D, V6Y, P62N, I187K, Q270A, S301R, W302K, C332A
V6Y, P62H, I187K
V6Y, Q108H, I187K
M1D, V6Y, P62H, I187K, C332A
M1D, V6Y, P62G, I187K, C332A
V6Y, P62G, I187K
M1D, V6Y, P62H, I187K
M1D, V6Y, Q108H, I187K
M1D, V6Y, P62N, I187K, C332A
M1D, V6Y, P62D, I187K, C332A
M1D, V6Y, P62E, I187K, C332A
V6Y, C164G, I187K, T249A
V6Y, C164G, I187K
V6Y, Q126L, I187K D251G
V6Y, L54M, Q69H, R78K, A171G, I187K
V6Y, P62T, I187K
V6Y, A150V, I187K
P5H, V6Y, P62S, I187K
V6Y, C164G, I187K
Q126Y, Q170T
Q126Y, A242F, Q270T
M1D, V6Y, P62G, A93E, Q126E, I187K, C332A
M1D, V6Y, P62G, A93E, Q126I, I187K, C332A
M1D, V6Y, P62G, A93E, Q126L, I187K, C332A
M1D, V6Y, P62G, A93E, Q126Y, I187K, C332A
M1D, V6Y, P62G, A93E, Q126F, I187K, C332A
M1D, V6Y, P62G, A93E, Q126H, I187K, C332A
M1D, V6Y, P62G, A93E, I187K, Q270S, C332A
M1D, V6Y, P62G, A93E, I187K, Q270T, C332A
M1D, V6Y, P62G, A93E, Q126Y, I187K, Q270T, C332A
M1D, V6Y, P62G, A93E, Q126Y, I187K, A242F, Q270T, C332A
M1D, V6Y, P62G, D80P, A93E, I187K, C332A
M1D, V6Y, P62G, A93E, R170P, I187K, C332A
M1D, V6Y, P62G, A93E, I187K, Q188P, C332A
M1D, V6Y, P62G, A93E, I187K, R189P, C332A
M1D, V6Y, P62G, A93E, I187K, E225P, C332A
M1D, V6Y, P62G, A93E, I187K, H239P, C332A
M1D, V6Y, P62G, A93E, I187K, E257P, C332A
M1D, V6Y, P62G, A93E, I187K, S301A, C332A
M1D, V6Y, P62G, A93E, I187K, S301D, C332A
M1D, V6Y, P62G, A93E, I187K, S301E, C332A
M1D, V6Y, P62G, A93E, I187K, S301F, C332A
M1D, V6Y, P62G, A93E, I187K, S301H, C332A
M1D, V6Y, P62G, A93E, I187K, S301K, C332A
M1D, V6Y, P62G, A93E, I187K, S301L, C332A
M1D, V6Y, P62G, A93E, I187K, S301M, C332A
M1D, V6Y, P62G, A93E, I187K, S301N, C332A
M1D, V6Y, P62G, A93E, I187K, S301P, C332A
M1D, V6Y, P62G, A93E, I187K, S301Q, C332A
M1D, V6Y, P62G, A93E, I187K, S301R, C332A
M1D, V6Y, P62G, A93E, I187K, S301T, C332A
M1D, V6Y, P62G, A93E, I187K, S301V, C332A
M1D, V6Y, P62G, A93E, I187K, S301W, C332A
M1D, V6Y, P62G, A93E, I187K, S301Y, C332A
M1D, V6Y, P62G, A93E, I187K, W302A, C332A
M1D, V6Y, P62G, A93E, I187K, W302D, C332A
M1D, V6Y, P62G, A93E, I187K, W302F, C332A
M1D, V6Y, P62G, A93E, I187K, W302G, C332A
M1D, V6Y, P62G, A93E, I187K, W302H, C332A
M1D, V6Y, P62G, A93E, I187K, W302I, C332A
M1D, V6Y, P62G, A93E, I187K, W302L, C332A
M1D, V6Y, P62G, A93E, I187K, W302M, C332A
M1D, V6Y, P62G, A93E, I187K, W302N, C332A
M1D, V6Y, P62G, A93E, I187K, W302P, C332A
M1D, V6Y, P62G, A93E, I187K, W302Q, C332A
M1D, V6Y, P62G, A93E, I187K, W302R, C332A
M1D, V6Y, P62G, A93E, I187K, W302S, C332A
M1D, V6Y, P62G, A93E, I187K, W302T, C332A
M1D, V6Y, P62G, A93E, I187K, W302V, C332A
M1D, V6Y, P62G, A93E, I187K, W302Y, C332A
M1D, V6Y, P62G, A93E, I187K, S301A, W302A, C332A
M1D, V6Y, P62G, A93E, I187K, S301A, W302R, C332A
M1D, V6Y, P62G, A93E, I187K, S301A, W302S, C332A
M1D, V6Y, P62G, A93E, I187K, S301A, W302T, C332A
M1D, V6Y, P62G, A93E, I187K, S301K, W302S, C332A
M1D, V6Y, P62G, A93E, I187K, S301K, W302R, C332A
M1D, V6Y, P62G, A93E, I187K, S301K, W302T, C332A
M1D, V6Y, P62G, A93E, I187K, S301N, W302S, C332A
M1D, V6Y, P62G, A93E, I187K, S301N, W302T, C332A
M1D, V6Y, P62G, A93E, I187K, S301T, W302R, C332A
Q126Y, Q270T
Q126Y, A242F, Q270T
M1D, V6Y, A42R, P62G, A93E, Q126Y, I187K, A242F, Q270T, C332A
M1D, V6Y, P62G, A93E, Q112E, Q126Y, I187K, Q270T, A242F,
C332A
M1D, V6Y, P62G, A93E, Q126Y, I187K, E225C, Q270T, A290C,
A242F, C332A
V6Y, A42R, P62G, A93E, Q126Y, I187K, Q270T, A242F, C332A
M1D, A42R, P62G, A93E, Q126Y, I187K, Q270T, A242F, C332A
M1D, V6Y, P62G, A93E, Q126Y, I187K, Q270T, A242F, C332A
M1D, V6Y, A42R, A93E, Q126Y, I187K, Q270T, A242F, C332A
M1D, V6Y, A42R, P62G, Q126Y, I187K, Q270T, A242F, C332A
M1D, V6Y, A42R, P62G, A93E, I187K, Q270T, A242F, C332A
M1D, V6Y, A42R, P62G, A93E, Q126Y, Q270T, A242F, C332A
M1D, V6Y, A42R, P62G, A93E, Q126Y, I187K, Q270T, C332A
M1D, V6Y, A42R, P62G, A93E, Q126Y, I187K, A242F, C332A
M1D, V6Y, A42R, P62G, A93E, Q126Y, I187K, Q270T, A242F

[0129] In certain embodiments, the sialidase comprises a substitution of M1, A42, and Q270, or a combination of any of the foregoing substitutions. These substitutions were found to, for example, improve the activity of the enzyme (see, Example 1). In certain embodiments, the sialidase comprises a substitution at each of M1, A42, and Q270. In certain embodiments, the sialidase comprises a substitution selected from MID, A42R, and Q270T, or a combination of any of the foregoing substitutions. In certain embodiments, the sialidase comprises each of the MID, A42R, and Q270T substitutions.

[0130] In certain embodiments, the sialidase comprises a substitution of V6, P62, A93, Q126, and I187, or a combination of any of the foregoing substitutions. These substitutions were found to, for example, improve the expression/yield of the enzyme (see, Example 1). In certain embodiments, the sialidase comprises a substitution at each of V6, P62, A93, Q126, and I187. In certain embodiments, the sialidase comprises a substitution selected from V6Y, P62G, A93E, Q126Y, and I187K, or a combination of any of the foregoing substitutions. In certain embodiments, the sialidase comprises each of the V6Y, P62G, A93E, Q126Y, and I187K substitutions.

[0131] In certain embodiments, the sialidase comprises a substitution of M1, A42, A242, and Q270, or a combination of any of the foregoing substitutions. These substitutions were found to, for example, improve the stability of the enzyme (see, Example 1). In certain embodiments, the sialidase comprises a substitution at each of M1, A42, A242, and Q270. In certain embodiments, the sialidase comprises a substitution selected from MID, A42R, A242F, and Q270T, or a combination of any of the foregoing substitutions. In certain embodiments, the sialidase comprises each of the MID, A42R, A242F, and Q270T substitutions.

[0132] In certain embodiments, the recombinant mutant sialidase enzyme comprises: (a) the V6Y, A42R, P62G, A93E, Q126Y, I187K, Q270T, A242F, and C332A substitutions; (b) the ΔM1 deletion and the V6Y, A42R, P62G, A93E, Q126Y, I187K, Q270T, A242F, and C332A substitutions; (c) the MID, A42R, P62G, A93E, Q126Y, I187K, Q270T, A242F, and C332A substitutions; (d) the MID, V6Y, P62G, A93E, Q126Y, I187K, Q270T, A242F, and C332A substitutions; (e) the MID, V6Y, A42R, A93E, Q126Y, I187K, Q270T, A242F, and C332A substitutions; (f) the MID, V6Y, A42R, P62G, Q126Y, I187K, Q270T, A242F, and C332A substitutions; (g) the MID, V6Y, A42R, P62G, A93E, I187K, Q270T, A242F, and C332A substitutions; (h) the MID, V6Y, A42R, P62G, A93E, Q126Y, Q270T, A242F, and C332A substitutions; (i) the MID, V6Y, A42R, P62G, A93E, Q126Y, I187K, Q270T, and C332A substitutions; (j) the MID, V6Y, A42R, P62G, A93E, Q126Y, I187K, A242F, and C332A substitutions; or (k) the MID, V6Y, A42R, P62G, A93E, Q126Y, I187K, Q270T, and A242F substitutions.

[0133] In certain embodiments, the sialidase comprises a substitution of M1, V6, A42, P62, A93, Q126, I187, A242, Q270, or C332A, or a combination of any of the foregoing substitutions. In certain embodiments, the sialidase comprises a substitution at each of M1, V6, A42, P62, A93, Q126, 1187, A242, Q270, and C332. In certain embodiments, the sialidase comprises a substitution selected from MID, V6Y, A42R, P62G, A93E, Q126Y, I187K, A242F, Q270T, and C332A, or a combination of any of the foregoing substitutions. In certain embodiments, the sialidase comprises each of the MID, V6Y, A42R, P62G, A93E, Q126Y, I187K, A242F, Q270T, and C332A substitutions.

[0134] In certain embodiments, the recombinant mutant human sialidase comprises the amino acid sequence of any one of SEQ ID NOs: 48-54, 149, 154, 159, 191, or 198, or an amino acid sequence that has at least 85%, 90%, 95%, 96%, 97%, 98%, or 99% sequence identity to any one of SEQ ID NOs: 48-54, 149, 154, 159, 191, or 198.

[0135] In certain embodiments, the recombinant mutant human sialidase comprises the amino acid sequence of

(SEQ ID NO: 199)
X₁X₂SX₃X₄X₅LQXESVFQSGAHAYRIPALLYLPGQQSLL
AFAEQRX₇SX₈X₉DEHAELIVX₁₀RRGDYDAX₁₁THQVQW
X₁₂AQEVVAQAX₁₃LX₁₄GHRSMNPCPLYDX₁₅QTGTLFL
FFIAIPX₁₆X₁₇VTEX₁₈QQLQTRANVTRLX₁₉X₂₀VTST
DHGRTWSSPRDLTDAAIGPX₂₁YREWSTFAVGPGHX₂₂LQ
LHDX₂₃X₂₄RSLVVPAYAYRKLHPX₂₅X₂₆X₂₇PIPSAFX₂₈
FLSHDHGRTWARGHFVX₂₉QDTX₃₀ECQVAEVX₃₁TGE
QRVVTLNARSX₃₂X₃₃X₃₄X₃₅RX₃₆QAQSX₃₇NX₃₈GLD
FQX₃₉X₄₀QX₄₁VKKLX₄₂EPPPX₄₃GX₄₄QGSVISFPSP
RSGPGSPAQX₄₅LLYTHPTHX₄₆X₄₇QRADLGAYLNPRPP
APEAWSEPX₄₈LLAKGSX₄₉AYSDLQSMGTGPDGSPLFG
X₅₀LYEANDYEEIX₅₁FX₅₂MFTLKQAFPAEYLPQ,

wherein X₁ is Ala, Arg, Asn, Asp, Gln, Glu, Gly, His, Leu, Lys, Met, Phe, Thr, Val, or not present, X₂ is Ala or Lys, X₃ is Asn or Leu, X₄ is Pro or His, X₅ is Phe, Trp, Tyr or Val, X₆ is Lys or Asp, X₇ is Ala or Arg, X₈ is Lys, Arg, or Glu, X₉ is Lys, Ala, Arg, or Glu, X₁₀ is Leu or Met, X₁₁ is Pro, Asn, Asp, His, Glu, Gly, Ser or Thr, X₁₂ is Gln or His, X₁₃ is Arg or Lys, X₁₄ is Asp or Pro, X₁₅ is Ala, Glu or Lys, X₁₆ is Gly or Asp, X₁₇ is Gln or His, X₁₈ is Gln, Arg, or Lys, X₁₉ is Ala, Cys, Ile, Ser, Val, or Leu, X₂₀ is Gln, Leu, Glu, Phe, His, Ile, Leu, or Tyr, X₂₁ is Ala or Val, X₂₂ is Cys or Gly, X₂₃ is Arg or Pro, X₂₄ is Ala or Gly, X₂₅ is Arg, Ile, or Lys, X₂₆ is Gln or Pro, X₂₇ is Arg or Pro, X₂₈ is Ala, Cys, Leu, or Val, X₂₉ is Ala, Cys, Asn, Ser, or Thr, X₃₀ is Leu, Ala, or Val, X₃₁ is Glu or Pro, X₃₂ is His or Pro, X₃₃ is Leu, Asp, Asn, or Tyr, X₃₄ is Arg, Ala, Asp, Leu, Gln, or Tyr, X₃₅ is Ala, Cys, Phe, Gly, His, Ile, Lys, Leu, Met, Asn, Gln, Arg, Ser, Val, Trp, or Tyr, X₃₆ is Val, Ile, or Lys, X₃₇ is Thr or Ala, X₃₈ is Asp or Gly, X₃₉ is Glu, Lys, or Pro, X₄₀ is Ser or Cys, X₄₁ is Leu, Asp, Phe, Gln, or Thr, X₄₂ is Val or Phe, X₄₃ is Gln, Ala, His, Phe, Pro, Ser, or Thr, X₄₄ is Cys or Val, X₄₅ is Trp or Arg, X₄₆ is Ser, Arg, Ala, Asp, Glu, Phe, Gly, His, Ile, Lys, Leu, Met, Asn, Pro, Gln, Thr, Val, Trp, or Tyr, X₄₇ is Trp, Lys, Ala, Asp, Glu, Phe, Gly, His, Ile, Lys, Leu, Met, Asn, Pro, Gln, Arg, Ser, Thr, Val, or Tyr, X₄₈ is Lys or Val, X₄₉ is Ala, Cys, Ser, or Val, X₅₀ is Cys, Leu, or Val, X₅₁ is Val or Arg, and X₅₂ is Leu, Gln, His, Ile, Lys, or Ser, and the sialidase comprises at least one mutation relative to wild-type human Neu2 (SEQ ID NO: 1).

[0136] In certain embodiments, the recombinant mutant human sialidase comprises the amino acid sequence of

(SEQ ID NO: 200)
X₁ASLPX₂LQX₃ESVFQSGAHAYRIPALLYLPGQQSLLAF
AEQRX₄SKKDEHAELIVLRRGDYDAX₅THQVQWQAQEVVA
QARLDGHRSMNPCPLYDX₆QTGTLFLFFIAIPGQVTEQQQ
LQTRANVTRLCX₇VTSTDHGRTWSSPRDLTDAAIGPAYRE
WSTFAVGPGHCLQLHDRARSLVVPAYAYRKLHPX₈QRPIP
SAFCFLSHDHGRTWARGHFVAQDTLECQVAEVETGEQRVV
TLNARSHLRX₉RVQAQSTNDGLDFQESQLVKKLVEPPPX₁₀
GCQGSVISFPSPRSGPGSPAQWLLYTHPTHX₁₁X₁₂QRA
DLGAYLNPRPPAPEAWSEPVLLAKGSX₁₃AYSDLQSMGTG
PDGSPLFGCLYEANDYEEIX₁₄FX₁₅MFTLKQAFPAEYLP
Q,

[0137] wherein X₁ is Ala, Arg, Asn, Asp, Gln, Glu, Gly, His, Leu, Lys, Met, Phe, Thr, Val, or not present, X₂ is Phe, Trp, Tyr or Val, X₃ is Lys or Asp, X₄ is Arg or Ala, X₅ is Pro, Asn, Asp, His, Glu, Gly, Ser or Thr, X₆ is Ala, Glu, or Lys, X₇ is Gln, Leu, Glu, Phe, His, Ile, Leu, or Tyr, X₈ is Arg, Ile, or Lys, X₉ is Ala, Cys, Phe, Gly, His, Ile, Lys, Leu, Met, Asn, Gln, Arg, Ser, Val, Trp, or Tyr, X₁₀ is Gln, Ala, His, Phe, Pro, Ser, or Thr, X₁₁ is Ser, Arg, Ala, Asp, Glu, Phe, Gly, His, Ile, Lys, Leu, Met, Asn, Pro, Gln, Thr, Val, Trp, or Tyr, X₁₂ is Trp, Lys, Ala, Asp, Glu, Phe, Gly, His, Ile, Lys, Leu, Met, Asn, Pro, Gln, Arg, Ser, Thr, Val, or Tyr, X₁₃ is Ala, Cys, Ser, or Val, X₁₄ is Val or Arg, and X₁₅ is Leu, Gln, His, Ile, Lys, or Ser, and the sialidase comprises at least one mutation relative to wild-type human Neu2 (SEQ ID NO: 1). In certain embodiments, X₁ is Ala, Asp, Met, or not present, X₂ is Tyr or Val, X₃ is Lys or Asp, X₄ is Arg or Ala, X₅ is Pro, Asn, Gly, Ser or Thr, X₆ is Ala or Glu, X₇ is Gln or Tyr, X₈ is Ile or Lys, X₉ is Ala or Thr, X₁₀ is Gln, Ala, or Thr, X₁₁ is Ser, Arg, or Ala, X₁₂ is Trp, Lys, or Arg, X₁₃ is Ala or Cys, X₁₄ is Val or Arg, and X₁₅ is Leu or Ile.

[0138] In certain embodiments, the recombinant mutant human sialidase comprises a conservative substitution relative to a recombinant mutant human sialidase sequence disclosed herein. As used herein, the term “conservative substitution” refers to a substitution with a structurally similar amino acid. For example, conservative substitutions may include those within the following groups: Ser and Cys; Leu, Ile, and Val; Glu and Asp; Lys and Arg; Phe, Tyr, and Trp; and Gln, Asn, Glu, Asp, and His. Conservative substitutions may also be defined by the BLAST (Basic Local Alignment Search Tool) algorithm, the BLOSUM substitution matrix (e.g., BLOSUM 62 matrix), or the PAM substitution:p matrix (e.g., the PAM 250 matrix).

[0139] Sequence identity may be determined in various ways that are within the skill of a person skilled in the art, e.g., using publicly available computer software such as BLAST, BLAST-2, ALIGN or Megalign (DNASTAR) software. BLAST (Basic Local Alignment Search Tool) analysis using the algorithm employed by the programs blastp, blastn, blastx, tblastn and tblastx (Karlin et al., (1990) Proc. Natl. Acad. Sci. USA 87:2264-2268; Altschul, (1993) J. Mol. Evol. 36:290-300; Altschul et al., (1997) Nucleic Acids Res. 25:3389-3402, incorporated by reference herein) are tailored for sequence similarity searching. For a discussion of basic issues in searching sequence databases see Altschul et al., (1994) Nature Genetics 6:119-129, which is fully incorporated by reference herein. Those skilled in the art can determine appropriate parameters for measuring alignment, including any algorithms needed to achieve maximal alignment over the full length of the sequences being compared. The search parameters for histogram, descriptions, alignments, expect (i.e., the statistical significance threshold for reporting matches against database sequences), cutoff, matrix and filter are at the default settings. The default scoring matrix used by blastp, blastx, tblastn, and tblastx is the BLOSUM62 matrix (Henikoff et al., (1992) Proc. Natl. Acad. Sci. USA 89:10915-10919, fully incorporated by reference herein). Four blastn parameters may be adjusted as follows: Q=10 (gap creation penalty); R=10 (gap extension penalty); wink=1 (generates word hits at every wink.sup.th position along the query); and gapw=16 (sets the window width within which gapped alignments are generated). The equivalent blastp parameter settings may be Q=9; R=2; wink=1; and gapw=32. Searches may also be conducted using the NCBI (National Center for Biotechnology Information) BLAST Advanced Option parameter (e.g.: -G, Cost to open gap [Integer]: default=5 for nucleotides/11 for proteins; -E, Cost to extend gap [Integer]: default=2 for nucleotides/1 for proteins; -q, Penalty for nucleotide mismatch [Integer]: default=−3; -r, reward for nucleotide match [Integer]: default=1; -e, expect value [Real]: default=10; —W, wordsize [Integer]: default=11 for nucleotides/28 for megablast/3 for proteins; -y, Dropoff (X) for blast extensions in bits: default=20 for blastn/7 for others; —X, X dropoff value for gapped alignment (in bits): default=15 for all programs, not applicable to blastn; and —Z, final X dropoff value for gapped alignment (in bits): 50 for blastn, 25 for others). ClustalW for pairwise protein alignments may also be used (default parameters may include, e.g., Blosum62 matrix and Gap Opening Penalty=10 and Gap Extension Penalty=0.1). A Bestfit comparison between sequences, available in the GCG package version 10.0, uses DNA parameters GAP=50 (gap creation penalty) and LEN=3 (gap extension penalty). The equivalent settings in Bestfit protein comparisons are GAP=8 and LEN=2.

b. Antibody Portion

[0140] As used herein, unless otherwise indicated, the term “antibody” is understood to mean an intact antibody (e.g., an intact monoclonal antibody) or a fragment thereof, such as an antigen-binding fragment of an antibody (e.g., an antigen-binding fragment of a monoclonal antibody) or a Fc fragment of an antibody (e.g., an Fe fragment of a monoclonal antibody), including an intact antibody, antigen-binding fragment, or Fc fragment that has been modified, engineered, or chemically conjugated. Examples of antigen-binding fragments include Fab, Fab′, (Fab′)₂, Fv, single chain antibodies (e.g., scFv), minibodies, and diabodies. Examples of antibodies that have been modified or engineered include chimeric antibodies, humanized antibodies, and multispecific antibodies (e.g., bispecific antibodies). An example of a chemically conjugated antibody is an antibody conjugated to a toxin moiety.

[0141] In certain embodiments, the fusion protein comprises an immunoglobulin Fc domain. As used herein, unless otherwise indicated, the term “immunoglobulin Fc domain” refers to a fragment of an immunoglobulin heavy chain constant region which, either alone or in combination with a second immunoglobulin Fc domain, is capable of binding to an Fc receptor. An immunoglobulin Fc domain may include, e.g., immunoglobulin CH2 and CH3 domains. An immunoglobulin Fc domain may include, e.g., immunoglobulin CH2 and CH3 domains and an immunoglobulin hinge region. Boundaries between immunoglobulin hinge regions, CH2, and CH3 domains are well known in the art, and can be found, e.g., in the PROSITE database (available on the world wide web at prosite.expasy.org).

[0142] In certain embodiments, the immunoglobulin Fc domain is derived from a human IgG1, IgG2, IgG3, IgG4, IgA1, IgA2, IgD, IgE, and IgM Fc domain. A single amino acid substitution (S228P according to Kabat numbering; designated IgG4Pro) may be introduced to abolish the heterogeneity observed in recombinant IgG4 antibody. See Angal, S. et al. (1993) MOL. IMMUNOL. 30:105-108.

[0143] In certain embodiments, the immunoglobulin Fc domain is derived from a human IgG1 isotype or another isotype that elicits antibody-dependent cell-mediated cytotoxicity (ADCC) and/or complement mediated cytotoxicity (CDC). In certain embodiments, the immunoglobulin Fc domain is derived from a human IgG1 isotype (e.g., SEQ ID NO: 31, SEQ ID NO: 5, or SEQ ID NO: 211).

[0144] In certain embodiments, the immunoglobulin Fc domain is derived from a human IgG4 isotype or another isotype that elicits little or no antibody-dependent cell-mediated cytotoxicity (ADCC) and/or complement mediated cytotoxicity (CDC). In certain embodiments, the immunoglobulin Fc domain is derived from a human IgG4 isotype.

[0145] In certain embodiments, the immunoglobulin Fc domain comprises either a “knob” mutation, e.g., T366Y, or a “hole” mutation, e.g., Y407T, for heterodimerization with a second polypeptide (residue numbers according to EU numbering, Kabat, E. A., et al. (1991) SEQUENCES OF PROTEINS OF IMMUNOLOGICAL INTEREST, FIFTH EDITION, U.S. Department of Health and Human Services, NIH Publication No. 91-3242). For example, in certain embodiments, the immunoglobulin Fc domain is derived from a human IgG1 Fc domain and comprises a Y407T mutation (e.g., the fusion protein comprises SEQ ID NO: 32, SEQ ID NO: 147, SEQ ID NO: 213, or SEQ ID NO: 215). In certain embodiments, the immunoglobulin Fc domain is derived from a human IgG1 Fc domain and comprises a T366Y mutation (e.g., the fusion protein comprises SEQ ID NO: 33, SEQ ID NO: 148, SEQ ID NO: 214, or SEQ ID NO: 216).

[0146] In certain embodiments, the immunoglobulin Fc domain is modified to prevent glycosylation of the Fc domain. For example, in certain embodiments, the immunoglobulin Fc domain is derived from a human IgG1 Fc domain and comprises a mutation at position N297, for example, an N297A or N297G mutation (residue numbers according to EU numbering, Kabat, E. A., et al., supra). For example, in certain embodiments, the fusion protein comprises SEQ ID NO: 212, SEQ ID NO: 215, or SEQ ID NO: 216.

[0147] In certain embodiments, the fusion protein comprises an immunoglobulin antigen-binding domain. The inclusion of such a domain may improve targeting of a fusion protein to a sialylated cancer cell, e.g., a HER2 expressing cancer cell, and/or to the tumor microenvironment. As used herein, unless otherwise indicated, the term “immunoglobulin antigen-binding domain” refers to a polypeptide that, alone or in combination with another immunoglobulin antigen-binding domain, defines an antigen-binding site. Exemplary immunoglobulin antigen-binding domains include, for example, immunoglobulin heavy chain variable region and an immunoglobulin light chain variable region, where the variable regions together define an antigen binding site, e.g., an anti-HER2 antigen binding site.

[0148] In certain embodiments, the immunoglobulin antigen-binding domain is derived from an anti-HER2 antibody. Exemplary anti-HER2 antibodies include trastuzumab (Herceptin®), pertuzumab (Perjeta®), CT-P6 (Herzuma®), trastuzumab-dkst (Ogivri™), MGAH22 (margetuximab), PF-05280014, ertumaxomab, gancotamab, timigutuzumab, Ontruzant, ABP-980, SB3, DS-8201, MYL-1410, BCD-022, and HD201.

[0149] In certain embodiments, the immunoglobulin antigen-binding domain is derived from trastuzumab. The trastuzumab heavy chain amino acid sequence is depicted in SEQ ID NO: 63, and the trastuzumab light chain amino acid sequence is depicted in SEQ ID NO: 64. The amino acid sequence of an exemplary scFv derived from trastuzumab is depicted in SEQ ID NO: 65.

c. Linker

[0150] In certain embodiments, the sialidase portion of the fusion protein can be linked or fused directly to the anti-HER2 antibody portion (e.g., immunoglobulin Fc domain and/or immunoglobulin antigen-binding domain) of the fusion protein. In other embodiments, the sialidase portion can be covalently bound to the anti-HER2 antibody portion by a linker.

[0151] The linker may couple, with one or more natural amino acids, the sialidase, or functional fragment thereof, and the antibody portions or fragments, where the amino acid (for example, a cysteine amino acid) may be introduced by site-directed mutagenesis. The linker may include one or more unnatural amino acids. It is contemplated that, in certain circumstances, a linker containing for example, one or more sulfhydryl reactive groups (e.g., a maleimide) may covalently link a cysteine in the sialidase portion or the antibody portion that is a naturally occurring cysteine residue or is the product of site-specific mutagenesis.

[0152] The linker may be a cleavable linker or a non-cleavable linker. Optionally or in addition, the linker may be a flexible linker or an inflexible linker.

[0153] The linker should be a length sufficiently long to allow the sialidase and the antibody portions to be linked without steric hindrance from one another and sufficiently short to retain the intended activity of the fusion protein. The linker preferably is sufficiently hydrophilic to avoid or minimize instability of the fusion protein. The linker preferably is sufficiently hydrophilic to avoid or minimize insolubility of the fusion protein. The linker should be sufficiently stable in vivo (e.g., it is not cleaved by serum, enzymes, etc.) to permit the fusion protein to be operative in vivo.

[0154] The linker may be from about 1 angstroms (Å) to about 150 Å in length, or from about 1 Å to about 120 Å in length, or from about 5 Å to about 110 Å in length, or from about 10 Å to about 100 Å in length. The linker may be greater than about 2, 3, 4, 5, 6, 7, 8, 9, 10, 11, 12, 13, 14, 15, 16, 17, 18, 19, 20, 25, 27, 30 or greater angstroms in length and/or less than about 110, 100, 90, 85, 80, 75, 70, 65, 60, 55, 50, 45, 43, 42, 41, 40, 39, 38, 37, 36, 35, 34, 33, 32, 31, or fewer A in length. Furthermore, the linker may be about 5, 10, 15, 20, 25, 30, 35, 40, 45, 50, 55, 60, 65, 70, 75, 80, 85, 90, 95, 100, 110, and 120 Å in length.

[0155] In certain embodiments, the linker comprises a polypeptide linker that connects or fuses the sialidase portion of the fusion protein to the anti-HER2 antibody portion (e.g., immunoglobulin Fc domain and/or immunoglobulin antigen-binding domain) of the fusion protein. For example, it is contemplated that a gene encoding a sialidase portion linked directly or indirectly (for example, via an amino acid containing linker) to an antibody portion can be created and expressed using conventional recombinant DNA technologies. For example, the amino terminus of a sialidase portion can be linked to the carboxy terminus of either the light or the heavy chain of an antibody portion. For example, for a Fab fragment, the amino terminus or carboxy terminus of the sialidase can be linked to the first constant domain of the heavy antibody chain (CH1). When a linker is employed, the linker may comprise hydrophilic amino acid residues, such as Gln, Ser, Gly, Glu, Pro, His and Arg. In certain embodiments, the linker is a peptide containing 1-25 amino acid residues, 1-20 amino acid residues, 2-15 amino acid residues, 3-10 amino acid residues, 3-7 amino acid residues, 4-25 amino acid residues, 4-20 amino acid residues, 4-15 amino acid residues, 4-10 amino acid residues, 5-25 amino acid residues, 5-20 amino acid residues, 5-15 amino acid residues, or 5-10 amino acid residues. Exemplary linkers include glycine and serine-rich linkers, e.g., (GlyGlyPro)ₙ, or (GlyGlyGlyGlySer)ₙ, where n is 1-5. In certain embodiments, the linker comprises, consists, or consists essentially of GGGGS (SEQ ID NO: 184). In certain embodiments, the linker comprises, consists, or consists essentially of GGGGSGGGGS (SEQ ID NO: 145). In certain embodiments, the linker comprises, consists, or consists essentially of EPKSS (SEQ ID NO: 146). Additional exemplary linker sequences are disclosed, e.g., in George et al. (2003) PROTEIN ENGINEERING 15:871-879, and U.S. Pat. Nos. 5,482,858 and 5,525,491.

[0156] In certain embodiments, the fusion protein comprises the amino acid sequence of any one of SEQ ID NOs: 66-85, 98-142, 150-153, 155-158, 160-163, 166-178, 185, 187, 189, 192-197, 203-210, 218, 220, 222, 224, 226, 228, 230, 232, 234, 236, 238, 240, 242, 244, or 249, or an amino acid sequence that has at least 85%, 90%, 95%, 96%, 97%, 98%, or 99% sequence identity to any one of SEQ ID NOs: 66-85, 98-142, 150-153, 155-158, 160-163, 166-178, 185, 187, 189, 192-197, 203-210, 218, 220, 222, 224, 226, 228, 230, 232, 234, 236, 238, 240, 242, 244, or 249.

d. Antibody Conjugates

[0157] The invention further provides antibody conjugates containing one or more of the fusion proteins disclosed herein. As used herein, unless otherwise indicated, the term “antibody conjugate” is understood to refer to an antibody, or a functional fragment thereof, that comprises antigen-binding activity (e.g., anti-HER2 antigen-binding activity) and/or Fc receptor-binding activity, conjugated (e.g., covalently coupled) to an additional functional moiety. In certain embodiments, the antibody or functional antibody fragment is conjugated to a sialidase enzyme, e.g., a recombinant mutant human sialidase enzyme disclosed herein. In certain embodiments, an antibody conjugate comprises a single polypeptide chain. In certain embodiments, an antibody conjugate comprises two, three, four, or more polypeptide chains that are covalently or non-covalently associated together to produce a multimeric complex, e.g., a dimeric, trimeric or tetrameric complex. For example, an antibody conjugate may comprise a first polypeptide (fusion protein) comprising a recombinant mutant human sialidase enzyme and an immunoglobulin heavy chain, and a second polypeptide comprising an immunoglobulin light chain, where, for example, the immunoglobulin heavy and light chains together define a single antigen-binding site, e.g., an anti-HER2 antigen-binding site.

[0158] In certain embodiments, the antibody conjugate can include a single sialidase. In other embodiments, the antibody conjugate can include more than one (e.g., two) sialidases. If more than one sialidase is included, the sialidases can be the same or different. In certain embodiments, the antibody conjugate can include a single anti-HER2 antigen-binding site. In other embodiments, the antibody conjugate can include more than one (e.g., two) anti-HER2 antigen-binding sites. If two antigen-binding sites are used, they can be the same or different. In certain embodiments, the antibody conjugate comprises an immunoglobulin Fc fragment.

[0159] In certain embodiments, the antibody conjugate comprises one or two immunoglobulin heavy chains, or a functional fragment thereof. In certain embodiments, the antibody conjugate comprises one or two immunoglobulin light chains, or a functional fragment thereof. In certain embodiments, the antibody conjugate comprises a sialidase fused to the N- or C-terminus of an immunoglobulin heavy chain or an immunoglobulin light chain.

[0160] FIG. 1 depicts exemplary antibody conjugate constructs containing one or more sialidase enzymes. For example, in FIG. 1A, a first anti-HER2 antigen-binding site (e.g., defined by a V_{H} and V_{L} domains) is depicted as 10, a second anti-HER2 antigen-binding site is depicted as 20, a sialidase is depicted as 30, and a Fc is depicted as 40. In each of the constructs depicted in FIGS. 1A-1I it is understood that the Fc may optionally be modified in some manner, e.g., using Knobs-into-Holes type technology, e.g., as depicted by 50 in FIG. 1B. Throughout FIG. 1 similar structures are depicted by similar schematic representations.

[0161] FIG. 1A depicts antibody conjugate constructs comprising a first polypeptide comprising a first immunoglobulin light chain; a second polypeptide comprising a first immunoglobulin heavy chain; a third polypeptide comprising a second immunoglobulin heavy chain; and a fourth polypeptide comprising a second immunoglobulin light chain. The first and second polypeptides can be covalently linked together, the third and fourth polypeptides can be covalently linked together, and the second and third polypeptides can be covalently linked together. The covalent linkages can be disulfide bonds. In certain embodiments, the first polypeptide and the second polypeptide together define a first anti-HER2 antigen-binding site as depicted as 10, and the third polypeptide and the fourth polypeptide together define a second anti-HER2 antigen-binding site as depicted as 20. A sialidase enzyme as depicted as 30 can be conjugated to the N- or C-terminus of the first and second immunoglobulin light chain or the first and second immunoglobulin heavy chain.

[0162] FIG. 1B depicts antibody conjugate constructs comprising a first polypeptide comprising a first immunoglobulin light chain; a second polypeptide comprising a first immunoglobulin heavy chain; a third polypeptide comprising a second immunoglobulin heavy chain; and a fourth polypeptide comprising a second immunoglobulin light chain. The first and second polypeptides can be covalently linked together, the third and fourth polypeptides can be covalently linked together, and the second and third polypeptides can be covalently linked together. The covalent linkages can be disulfide bonds. In certain embodiments, the first polypeptide and the second polypeptide together define a first anti-HER2 antigen-binding site, and the third polypeptide and the fourth polypeptide together define a second anti-HER2 antigen-binding site. A sialidase enzyme can be conjugated to the N- or C-terminus of the first immunoglobulin light chain or the first immunoglobulin heavy chain.

[0163] FIG. 1C depicts antibody conjugate constructs comprising a first polypeptide comprising an immunoglobulin light chain; a second polypeptide comprising an immunoglobulin heavy chain; and a third polypeptide comprising an immunoglobulin Fc domain. The first and second polypeptides can be covalently linked together and the second and third polypeptides can be covalently linked together. The covalent linkages can be disulfide bonds. In certain embodiments, the first polypeptide and the second polypeptide together define an anti-HER2 antigen-binding site. A sialidase enzyme can be conjugated to the N- or C-terminus of the first immunoglobulin light chain or the first immunoglobulin heavy chain.

[0164] FIG. 1D depicts antibody conjugate constructs comprising a first polypeptide comprising an immunoglobulin light chain; a second polypeptide comprising an immunoglobulin heavy chain; and a third polypeptide comprising an immunoglobulin Fc domain and a first sialidase enzyme. The first and second polypeptides can be covalently linked together and the second and third polypeptides can be covalently linked together. The covalent linkages can be disulfide bonds. The third polypeptide comprises the sialidase and the immunoglobulin Fc domain in an N- to C-terminal orientation. In certain embodiments, the first polypeptide and the second polypeptide together define an anti-HER2 antigen-binding site. An optional second sialidase enzyme can be conjugated to the N- or C-terminus of the first immunoglobulin light chain or the first immunoglobulin heavy chain.

[0165] FIG. 1E depicts antibody conjugate constructs comprising a first polypeptide comprising an immunoglobulin light chain; a second polypeptide comprising an immunoglobulin heavy chain; and a third polypeptide comprising an immunoglobulin Fc domain and a first sialidase enzyme. The first and second polypeptides can be covalently linked together and the second and third polypeptides can be covalently linked together. The covalent linkages can be disulfide bonds. The third polypeptide comprises the immunoglobulin Fc domain and the sialidase in an N- to C-terminal orientation. In certain embodiments, the first polypeptide and the second polypeptide together define an anti-HER2 antigen-binding site. An optional second sialidase enzyme can be conjugated to the N- or C-terminus of the first immunoglobulin light chain or the first immunoglobulin heavy chain.

[0166] FIG. 1F depicts antibody conjugate constructs comprising a first polypeptide comprising a first immunoglobulin Fc domain, and a second polypeptide comprising a second immunoglobulin Fc domain. The first and second polypeptides can be covalently linked together. The covalent linkages can be disulfide bonds. A sialidase enzyme can be conjugated to the N- or C-terminus of the first immunoglobulin Fc domain or to the N- or C-terminus of the second immunoglobulin Fc domain. An optional second sialidase enzyme can be conjugated to the N- or C-terminus of the first immunoglobulin Fc domain or to the N- or C-terminus of the second immunoglobulin Fc domain.

[0167] FIG. 1G depicts antibody conjugate constructs comprising a first polypeptide comprising an immunoglobulin light chain; and a second polypeptide comprising an immunoglobulin heavy chain variable region. The first and second polypeptides can be covalently linked together. The covalent linkages can be disulfide bonds. In certain embodiments, the first polypeptide and the second polypeptide together define an anti-HER2 antigen-binding site. The sialidase enzyme can be conjugated to the N- or C-terminus of the immunoglobulin light chain or the immunoglobulin heavy chain variable region.

[0168] FIG. 1H depicts antibody conjugate constructs comprising a first polypeptide comprising a first immunoglobulin Fc domain, and a second polypeptide comprising a second immunoglobulin Fc domain. The first and second polypeptides can be covalently linked together. The covalent linkages can be disulfide bonds. A sialidase enzyme can be conjugated to the N-terminus of the first immunoglobulin Fc domain or the second immunoglobulin Fc domain. An optional second sialidase enzyme can be conjugated to the N-terminus of the second immunoglobulin Fc domain or the first immunoglobulin Fc domain, respectively. A single chain variable fragment (scFv) can be conjugated to the C-terminus of the first immunoglobulin Fc domain or the second immunoglobulin Fc domain. An optional second single chain variable fragment (scFv) can be conjugated to the C-terminus of the first immunoglobulin Fc domain or the second immunoglobulin Fc domain, respectively.

[0169] FIG. 1I depicts antibody conjugate constructs similar to those depicted in FIG. 1H except that each scFv is replaced with an immunoglobulin antigen binding fragment, e.g., an Fab. For example, FIG. 1I depicts antibody conjugate constructs comprising a first polypeptide comprising a first immunoglobulin Fc domain, and a second polypeptide comprising a second immunoglobulin Fc domain. The first and second polypeptides can be covalently linked together. The covalent linkages can be disulfide bonds. A sialidase enzyme can be conjugated to the N-terminus of the first immunoglobulin Fc domain or the second immunoglobulin Fc domain. An optional second sialidase enzyme can be conjugated to the N-terminus of the second immunoglobulin Fc domain or the first immunoglobulin Fc domain, respectively. An antibody fragment (Fab) can be conjugated or fused to the C-terminus of the first immunoglobulin Fc domain or the second immunoglobulin Fc domain. An optional second antibody fragment (Fab) can be conjugated or fused to the C-terminus of the second immunoglobulin Fc domain or the first immunoglobulin Fc domain, respectively. In the case of a fusion, the C terminus of the Fc domain is linked (either by a bond or an amino acid linker) to a first polypeptide chain defining an anti-HER2 immunoglobulin antigen binding fragment. In the case of antibodies that have an antigen binding site defined by a single variable region, then this may be sufficient to impart binding affinity to a target antigen, e.g., HER2. In other instances, e.g., in the case of a human antibody, the first polypeptide chain defining an immunoglobulin antigen binding fragment can be conjugated (e.g., covalently conjugated, e.g., via a disulfide bond) to a second polypeptide chain defining an immunoglobulin antigen binding fragment, there the two antigen binding fragments together define an antigen binding site for binding the target antigen, e.g., HER2.

[0170] FIG. 2 depicts additional antibody conjugate constructs. For example, FIG. 2 depicts an antibody conjugate construct comprising a first polypeptide comprising an immunoglobulin light chain; a second polypeptide comprising an immunoglobulin heavy chain and an scFv; and a third polypeptide comprising an immunoglobulin Fc domain and a first sialidase enzyme. The first and second polypeptides can be covalently linked together and the second and third polypeptides can be covalently linked together. The covalent linkages can be disulfide bonds. The second polypeptide comprises the heavy chain and the scFv in an N- to C-terminal orientation. The third polypeptide comprises the sialidase and the immunoglobulin Fc domain in an N- to C-terminal orientation. In certain embodiments, the first polypeptide and the second polypeptide together define a first antigen-binding site. In certain embodiments, the scFv defines a second antigen-binding site. FIG. 2 depicts an additional antibody construct comprising a first polypeptide comprising an immunoglobulin light chain; a second polypeptide comprising an immunoglobulin heavy chain; and a third polypeptide comprising an immunoglobulin Fc domain and a first sialidase enzyme, wherein a Fab fragment is conjugated to the N-terminus of the immunoglobulin heavy chain. The first and second polypeptides can be covalently linked together and the second and third polypeptides can be covalently linked together. The covalent linkages can be disulfide bonds. The third polypeptide comprises the sialidase and the immunoglobulin Fc domain in an N- to C-terminal orientation. In certain embodiments, the first polypeptide and the second polypeptide together define a first antigen-binding site. In certain embodiments, the Fab fragment defines a second antigen-binding site. In each of the constructs depicted in FIG. 2 it is understood that an scFv, when present, may be replaced with a Fab fragment, or a Fab fragment, when present, may be replaced with an scFv. In each of the constructs depicted in FIG. 2, it is understood that the Fc may optionally be modified in some manner.

[0171] In certain embodiments, the antibody conjugate comprises a first polypeptide comprising a first immunoglobulin light chain; a second polypeptide comprising a first immunoglobulin heavy chain and a first sialidase; a third polypeptide comprising a second immunoglobulin heavy chain and a second sialidase; and a fourth polypeptide comprising a second immunoglobulin light chain. An example of this embodiment is shown in FIG. 3A. The first and second polypeptides can be covalently linked together, the third and fourth polypeptides can be covalently linked together, and the second and third polypeptides can be covalently linked together. The covalent linkages can be disulfide bonds. In certain embodiments, the first polypeptide and the second polypeptide together define a first anti-HER2 antigen-binding site, and the third polypeptide and the fourth polypeptide together define a second anti-HER2 antigen-binding site. In certain embodiments, the second and third polypeptides comprise the first and second immunoglobulin heavy chain and the first and second sialidase, respectively, in an N- to C-terminal orientation. In certain embodiments, the second and third polypeptides comprise the first and second sialidase and the first and second immunoglobulin heavy chain, respectively, in an N- to C-terminal orientation.

[0172] In certain embodiments, the antibody conjugate comprises a first polypeptide comprising an immunoglobulin light chain; a second polypeptide comprising an immunoglobulin heavy chain; and a third polypeptide comprising an immunoglobulin Fc domain and a sialidase. An example of this embodiment is shown in FIG. 3B. The first and second polypeptides can be covalently linked together and the second and third polypeptides can be covalently linked together. The covalent linkages can be disulfide bonds. In certain embodiments, the first polypeptide and the second polypeptide together define an anti-HER2 antigen-binding site. In certain embodiments, the third polypeptide comprises the sialidase and the immunoglobulin Fc domain in an N- to C-terminal orientation, or the immunoglobulin Fc domain and the sialidase in an N- to C-terminal orientation.

[0173] In certain embodiments, the first polypeptide comprises the amino acid sequence of SEQ ID NO: 66, or an amino acid sequence that has at least 85%, 90%, 95%, 96%, 97%, 98%, or 99% sequence identity to SEQ ID NO: 66. In certain embodiments, the second polypeptide comprises the amino acid sequence of any one of SEQ ID NOs: 67 or 189, or an amino acid sequence that has at least 85%, 90%, 95%, 96%, 97%, 98%, or 99% sequence identity to any one of SEQ ID NOs: 67 or 189. In certain embodiments, the third polypeptide comprises the amino acid sequence of any one of SEQ ID NOs: 68-74, 98-112, 150, 151, 155, 156, 160, 161, 185, 187, 192, 195, 203-208, or an amino acid sequence that has at least 85%, 90%, 95%, 96%, 97%, 98%, or 99% sequence identity to any one of SEQ ID NOs: 68-74, 98-112, 150, 151, 155, 156, 160, 161, 185, 187, 192, 195, 203-208.

[0174] In certain embodiments, the third polypeptide comprises the amino acid sequence of

(SEQ ID NO: 201)
X₁X₂SX₃X₄X₅LQXESVFQSGAHAYRIPALLYLPGQQSLL
AFAEQRX₇SX₈X₉DEHAELIVX₁₀RRGDYDAX₁₁THQVQW
X₁₂AQEVVAQAX₁₃LX₁₄GHRSMNPCPLYDX₁₅QTGTLFL
FFIAIPX₁₆X₁₇VTEX₁₈QQLQTRANVTRLX₁₉X₂₀VTST
DHGRTWSSPRDLTDAAIGPX₂₁YREWSTFAVGPGHX₂₂LQ
LHDX₂₃X₂₄RSLVVPAYAYRKLHPX₂₅X₂₆X₂₇PIPSAFX₂₈
FLSHDHGRTWARGHFVX₂₉QDTX₃₀ECQVAEVX₃₁TGE
QRVVTLNARSX₃₂X₃₃X₃₄X₃₅RX₃₆QAQSX₃₇NX₃₈GLD
FQX₃₉X₄₀QX₄₁VKKLX₄₂EPPPX₄₃GX₄₄QGSVISFPSP
RSGPGSPAQX₄₅LLYTHPTHX₄₆X₄₇QRADLGAYLNPRPP
APEAWSEPX₄₈LLAKGSX₄₉AYSDLQSMGTGPDGSPLFGX₅₀
LYEANDYEEIX₅₁FX₅₂MFTLKQAFPAEYLPQX₅₃DKT
HTCPPCPAPELLGGPSVELFPPKPKDTLMISRTPEVTCVV
VDVSHEDPEVKFNWYVDGVEVHNAKTKPREEQYNSTYRVV
SVLTVLHQDWLNGKEYKCKVSNKALPAPIEKTISKAKGQP
REPQVYTLPPSREEMTKNQVSLTCLVKGFYPSDIAVEWES
NGQPENNYKTTPPVLDSDGSFFLTSKLTVDKSRWQQGNVF
SCSVMHEALHNHYTQKSLSLSPGK,

[0175] wherein X₁ is Ala, Arg, Asn, Asp, Gln, Glu, Gly, His, Leu, Lys, Met, Phe, Thr, Val, or not present, X₂ is Ala or Lys, X₃ is Asn or Leu, X₄ is Pro or His, X₅ is Phe, Trp, Tyr or Val, X₆ is Lys or Asp, X₇ is Ala or Arg, X₈ is Lys, Arg, or Glu, X₉ is Lys, Ala, Arg, or Glu, X₁₀ is Leu or Met, X₁₁ is Pro, Asn, Asp, His, Glu, Gly, Ser or Thr, X₁₂ is Gln or His, X₁₃ is Arg or Lys, X₁₄ is Asp or Pro, X₁₅ is Ala, Glu or Lys, X₁₆ is Gly or Asp, X₁₇ is Gln or His, X₁₈ is Gln, Arg, or Lys, X₁₉ is Ala, Cys, Ile, Ser, Val, or Leu, X₂₀ is Gln, Leu, Glu, Phe, His, Ile, Leu, or Tyr, X₂₁ is Ala or Val, X₂₂ is Cys or Gly, X₂₃ is Arg or Pro, X₂₄ is Ala or Gly, X₂₅ is Arg, Ile, or Lys, X₂₆ is Gln or Pro, X₂₇ is Arg or Pro, X₂₈ is Ala, Cys, Leu, or Val, X₂₉ is Ala, Cys, Asn, Ser, or Thr, X₃₀ is Leu, Ala, or Val, X₃₁ is Glu or Pro, X₃₂ is His or Pro, X₃₃ is Leu, Asp, Asn, or Tyr, X₃₄ is Arg, Ala, Asp, Leu, Gln, or Tyr, X₃₅ is Ala, Cys, Phe, Gly, His, Ile, Lys, Leu, Met, Asn, Gln, Arg, Ser, Val, Trp, or Tyr, X₃₆ is Val, Ile, or Lys, X₃₇ is Thr or Ala, X₃₈ is Asp or Gly, X₃₉ is Glu, Lys, or Pro, X₄₀ is Ser or Cys, X₄₁ is Leu, Asp, Phe, Gln, or Thr, X₄₂ is Val or Phe, X₄₃ is Gln, Ala, His, Phe, Pro, Ser, or Thr, X₄₄ is Cys or Val, X₄₅ is Trp or Arg, X₄₆ is Ser, Arg, Ala, Asp, Glu, Phe, Gly, His, Ile, Lys, Leu, Met, Asn, Pro, Gln, Thr, Val, Trp, or Tyr, X₄₇ is Trp, Lys, Ala, Asp, Glu, Phe, Gly, His, Ile, Lys, Leu, Met, Asn, Pro, Gln, Arg, Ser, Thr, Val, or Tyr, X₄₈ is Lys or Val, X₄₉ is Ala, Cys, Ser, or Val, X₅₀ is Cys, Leu, or Val, X₅₁ is Val or Arg, X₅₂ is Leu, Gln, His, Ile, Lys, or Ser, and X₅₃ is GGGGS (SEQ ID NO: 184), GGGGSGGGGS (SEQ ID NO: 145), or EPKSS (SEQ ID NO: 146), and the sialidase comprises at least one mutation relative to wild-type human Neu2 (SEQ ID NO: 1).

[0176] In certain embodiments, the third polypeptide comprises the amino acid sequence of

(SEQ ID NO: 202)
X₁ASLPX₂LQX₃ESVFQSGAHAYRIPALLYLPGQQSLLAF
AEQRX₄SKKDEHAELIVLRRGDYDAX₅THQVQWQAQEVVA
QARLDGHRSMNPCPLYDX₆QTGTLELFFIAIPGQVTEQQQ
LQTRANVTRLCX₇VTSTDHGRTWSSPRDLTDAAIGPAYRE
WSTFAVGPGHCLQLHDRARSLVVPAYAYRKLHPX₈QRPIP
SAFCFLSHDHGRTWARGHFVAQDTLECQVAEVETGEQRVV
TLNARSHLRX₉RVQAQSTNDGLDFQESQLVKKLVEPPPX₁₀
GCQGSVISFPSPRSGPGSPAQWLLYTHPTHX₁₁X₁₂QRA
DLGAYLNPRPPAPEAWSEPVLLAKGSX₁₃AYSDLQSMGTG
PDGSPLFGCLYEANDYEEIX₁₄FX₁₅MFTLKQAFPAEYLP
QX₁₆DKTHTCPPCPAPELLGGPSVELFPPKPKDTLMISRT
PEVTCVVVDVSHEDPEVKENWYVDGVEVHNAKTKPREEQY
NSTYRVVSVLTVLHQDWLNGKEYKCKVSNKALPAPIEKTI
SKAKGQPREPQVYTLPPSREEMTKNQVSLTCLVKGFYPSD
IAVEWESNGQPENNYKTTPPVLDSDGSFFLTSKLTVDKSR
WQQGNVFSCSVMHEALHNHYTQKSLSLSPGK,

[0177] wherein X₁ is Ala, Arg, Asn, Asp, Gln, Glu, Gly, His, Leu, Lys, Met, Phe, Thr, Val, or not present, X₂ is Phe, Trp, Tyr or Val, X₃ is Lys or Asp, X₄ is Arg or Ala, X₅ is Pro, Asn, Asp, His, Glu, Gly, Ser or Thr, X₆ is Ala, Glu, or Lys, X₇ is Gln, Leu, Glu, Phe, His, Ile, Leu, or Tyr, X₈ is Arg, Ile, or Lys, X₉ is Ala, Cys, Phe, Gly, His, Ile, Lys, Leu, Met, Asn, Gln, Arg, Ser, Val, Trp, or Tyr, X₁₀ is Gln, Ala, His, Phe, Pro, Ser, or Thr, X₁₁ is Ser, Arg, Ala, Asp, Glu, Phe, Gly, His, Ile, Lys, Leu, Met, Asn, Pro, Gln, Thr, Val, Trp, or Tyr, X₁₂ is Trp, Lys, Ala, Asp, Glu, Phe, Gly, His, Ile, Lys, Leu, Met, Asn, Pro, Gln, Arg, Ser, Thr, Val, or Tyr, X₁₃ is Ala, Cys, Ser, or Val, X₁₄ is Val or Arg, X₁₅ is Leu, Gln, His, Ile, Lys, or Ser, and X₁₆ is GGGGS (SEQ ID NO: 184), GGGGSGGGGS (SEQ ID NO: 145), or EPKSS (SEQ ID NO: 146), and the sialidase comprises at least one mutation relative to wild-type human Neu2 (SEQ ID NO: 1). In certain embodiments, X₁ is Ala, Asp, Met, or not present, X₂ is Tyr or Val, X₃ is Lys or Asp, X₄ is Arg or Ala, X₅ is Pro, Asn, Gly, Ser or Thr, X₆ is Ala or Glu, X₇ is Gln or Tyr, X₈ is Ile or Lys, X₉ is Ala or Thr, X₁₀ is Gln, Ala, or Thr, X₁₁ is Ser, Arg, or Ala, X₁₂ is Trp, Lys, or Arg, X₁₃ is Ala or Cys, X₁₄ is Val or Arg, and X₁₅ is Leu or Ile.

[0178] In certain embodiments, the first polypeptide comprises SEQ ID NO: 66, the second polypeptide comprises SEQ ID NO: 67, and the third polypeptide comprises SEQ ID NO: 68. In certain embodiments, the first polypeptide comprises SEQ ID NO: 66, the second polypeptide comprises SEQ ID NO: 67, and the third polypeptide comprises SEQ ID NO: 69. In certain embodiments, the first polypeptide comprises SEQ ID NO: 66, the second polypeptide comprises SEQ ID NO: 67, and the third polypeptide comprises SEQ ID NO: 70. In certain embodiments, the first polypeptide comprises SEQ ID NO: 66, the second polypeptide comprises SEQ ID NO: 67, and the third polypeptide comprises SEQ ID NO: 71. In certain embodiments, the first polypeptide comprises SEQ ID NO: 66, the second polypeptide comprises SEQ ID NO: 67, and the third polypeptide comprises SEQ ID NO: 72. In certain embodiments, the first polypeptide comprises SEQ ID NO: 66, the second polypeptide comprises SEQ ID NO: 67, and the third polypeptide comprises SEQ ID NO: 73. In certain embodiments, the first polypeptide comprises SEQ ID NO: 66, the second polypeptide comprises SEQ ID NO: 67, and the third polypeptide comprises SEQ ID NO: 74. In certain embodiments, the first polypeptide comprises SEQ ID NO: 66, the second polypeptide comprises SEQ ID NO: 67, and the third polypeptide comprises SEQ ID NO: 98. In certain embodiments, the first polypeptide comprises SEQ ID NO: 66, the second polypeptide comprises SEQ ID NO: 67, and the third polypeptide comprises SEQ ID NO: 99. In certain embodiments, the first polypeptide comprises SEQ ID NO: 66, the second polypeptide comprises SEQ ID NO: 67, and the third polypeptide comprises SEQ ID NO: 100. In certain embodiments, the first polypeptide comprises SEQ ID NO: 66, the second polypeptide comprises SEQ ID NO: 67, and the third polypeptide comprises SEQ ID NO: 101. In certain embodiments, the first polypeptide comprises SEQ ID NO: 66, the second polypeptide comprises SEQ ID NO: 67, and the third polypeptide comprises SEQ ID NO: 102. In certain embodiments, the first polypeptide comprises SEQ ID NO: 66, the second polypeptide comprises SEQ ID NO: 67, and the third polypeptide comprises SEQ ID NO: 103. In certain embodiments, the first polypeptide comprises SEQ ID NO: 66, the second polypeptide comprises SEQ ID NO: 67, and the third polypeptide comprises SEQ ID NO: 104. In certain embodiments, the first polypeptide comprises SEQ ID NO: 66, the second polypeptide comprises SEQ ID NO: 67, and the third polypeptide comprises SEQ ID NO: 105. In certain embodiments, the first polypeptide comprises SEQ ID NO: 66, the second polypeptide comprises SEQ ID NO: 67, and the third polypeptide comprises SEQ ID NO: 106. In certain embodiments, the first polypeptide comprises SEQ ID NO: 66, the second polypeptide comprises SEQ ID NO: 67, and the third polypeptide comprises SEQ ID NO: 107. In certain embodiments, the first polypeptide comprises SEQ ID NO: 66, the second polypeptide comprises SEQ ID NO: 67, and the third polypeptide comprises SEQ ID NO: 108. In certain embodiments, the first polypeptide comprises SEQ ID NO: 66, the second polypeptide comprises SEQ ID NO: 67, and the third polypeptide comprises SEQ ID NO: 109. In certain embodiments, the first polypeptide comprises SEQ ID NO: 66, the second polypeptide comprises SEQ ID NO: 67, and the third polypeptide comprises SEQ ID NO: 110. In certain embodiments, the first polypeptide comprises SEQ ID NO: 66, the second polypeptide comprises SEQ ID NO: 67, and the third polypeptide comprises SEQ ID NO: 111. In certain embodiments, the first polypeptide comprises SEQ ID NO: 66, the second polypeptide comprises SEQ ID NO: 67, and the third polypeptide comprises SEQ ID NO: 112. In certain embodiments, the first polypeptide comprises SEQ ID NO: 66, the second polypeptide comprises SEQ ID NO: 67, and the third polypeptide comprises SEQ ID NO: 150. In certain embodiments, the first polypeptide comprises SEQ ID NO: 66, the second polypeptide comprises SEQ ID NO: 67, and the third polypeptide comprises SEQ ID NO: 151. In certain embodiments, the first polypeptide comprises SEQ ID NO: 66, the second polypeptide comprises SEQ ID NO: 67, and the third polypeptide comprises SEQ ID NO: 155. In certain embodiments, the first polypeptide comprises SEQ ID NO: 66, the second polypeptide comprises SEQ ID NO: 67, and the third polypeptide comprises SEQ ID NO: 156. In certain embodiments, the first polypeptide comprises SEQ ID NO: 66, the second polypeptide comprises SEQ ID NO: 67, and the third polypeptide comprises SEQ ID NO: 160. In certain embodiments, the first polypeptide comprises SEQ ID NO: 66, the second polypeptide comprises SEQ ID NO: 67, and the third polypeptide comprises SEQ ID NO: 161. In certain embodiments, the first polypeptide comprises SEQ ID NO: 66, the second polypeptide comprises SEQ ID NO: 67, and the third polypeptide comprises SEQ ID NO: 192. In certain embodiments, the first polypeptide comprises SEQ ID NO: 66, the second polypeptide comprises SEQ ID NO: 67, and the third polypeptide comprises SEQ ID NO: 195. In certain embodiments, the first polypeptide comprises SEQ ID NO: 66, the second polypeptide comprises SEQ ID NO: 189, and the third polypeptide comprises SEQ ID NO: 185. In certain embodiments, the first polypeptide comprises SEQ ID NO: 66, the second polypeptide comprises SEQ ID NO: 189, and the third polypeptide comprises SEQ ID NO: 187. In certain embodiments, the first polypeptide comprises SEQ ID NO: 66, the second polypeptide comprises SEQ ID NO: 189, and the third polypeptide comprises SEQ ID NO: 205.

[0179] In certain embodiments, the antibody conjugate comprises a first polypeptide comprising a first sialidase, a first immunoglobulin Fc domain, and a first single chain variable fragment (scFv) (it is also understood that the scFv may be replaced by a first polypeptide chain of an immunoglobulin antigen binding fragment, e.g., Fab fragment); and a second polypeptide comprising a second sialidase, a second immunoglobulin Fc domain, and a second single chain variable fragment (scFv) (it is also understood that the scFv may be replaced by a second polypeptide chain of an immunoglobulin antigen binding fragment, e.g., Fab fragment). An example of this embodiment is shown in FIG. 3C (in the construct depicted in FIG. 3C it is understood that an scFv, when present, may be replaced with a Fab fragment, or a Fab fragment, when present, may be replaced with an scFv). The first and second polypeptides can be covalently linked together. The covalent linkages can be disulfide bonds. In certain embodiments, the first scFv defines a first anti-HER2 antigen-binding site, and the second scFv defines a second anti-HER2 antigen-binding site. In certain embodiments, the first polypeptide comprises the first sialidase, the first immunoglobulin Fc domain, and the first scFv in an N- to C-terminal orientation. In certain embodiments, the first polypeptide comprises the first scFv, the first immunoglobulin Fc domain, and the first sialidase in an N- to C-terminal orientation. In certain embodiments, the second polypeptide comprises the second sialidase, the second immunoglobulin Fc domain, and the second scFv in an N- to C-terminal orientation. In certain embodiments, the second polypeptide comprises the second scFv, the second immunoglobulin Fc domain, and the second sialidase in an N- to C-terminal orientation.

[0180] In certain embodiments, the first polypeptide comprises the amino acid sequence of any one of SEQ ID NOs: 77-83, 166-178, 194, 197, 244, or 249, or an amino acid sequence that has at least 85%, 90%, 95%, 96%, 97%, 98%, or 99% sequence identity to any one of SEQ ID NOs: 77-83, 166-178, 194, 197, 244, or 249. In certain embodiments, the second polypeptide comprises the amino acid sequence of any one of SEQ ID NOs: 77-83, 166-178, 194, 197, 244, or 249, or an amino acid sequence that has at least 85%, 90%, 95%, 96%, 97%, 98%, or 99% sequence identity to any one of SEQ ID NOs: 77-83, 166-178, 194, 197, 244, or 249.

[0181] In certain embodiments, the first and/or second polypeptide comprises the amino acid sequence of

(SEQ ID NO: 248)
X₁X₂SX₃X₄X₅LQX₆ESVFQSGAHAYRIPALLYLPGQQSL
LAFAEQRX₇SX₈X₉DEHAELIVX₁₀RRGDYDAX₁₁THQVQ
WX₁₂AQEVVAQAX₁₃LX₁₄GHRSMNPCPLYDX₁₅QTGTLF
LFFIAIPX₁₆X₁₇VTEX₁₈QQLQTRANVTRLX₁₉X₂₀VTS
TDHGRTWSSPRDLTDAAIGPX₂₁YREWSTFAVGPGHX₂₂L
QLHDX₂₃X₂₄RSLVVPAYAYRKLHPX₂₅X₂₆X₂₇PIPSAF
X₂₈FLSHDHGRTWARGHFVX₂₉QDTX₃₀ECQVAEVX₃₁TG
EQRVVTLNARSX₃₂X₃₃X₃₄X₃₅RX₃₆QAQSX₃₇NX₃₈GL
DFQX₃₉X₄₀QX₄₁VKKLX₄₂EPPPX₄₃GX₄₄QGSVISFPS
PRSGPGSPAQX₄₅LLYTHPTHX₄₆X₄₇QRADLGAYLNPRP
PAPEAWSEPX₄₈LLAKGSX₄₉AYSDLQSMGTGPDGSPLFG
X₅₀LYEANDYEEIX₅₁FX₅₂MFTLKQAFPAEYLPQX₅₃DK
THTCPPCPAPELLGGPSVFLFPPKPKDTLMISRTPEVTCV
VVDVSHEDPEVKFNWYVDGVEVHNAKTKPREEQYNSTYRV
VSVLTVLHQDWLNGKEYKCKVSNKALPAPIEKTISKAKGQ
PREPQVYTLPPSREEMTKNQVSLTCLVKGFYPSDIAVEWE
SNGQPENNYKTTPPVLDSDGSFFLYSKLTVDKSRWQQGNV
FSCSVMHEALHNHYTQKSLSLSPGKGGGGSGGGGSGGGGS
EVQLVESGGGLVQPGGSLRLSCAASGENIKDTYIHWVRQA
PGKGLEWVARIYPTNGYTRYADSVKGRFTISADTSKNTAY
LQMNSLRAEDTAVYYCSRWGGDGFYAMDYWGQGTLVTVSS
GGGGSGGGGSGGGGSDIQMTQSPSSLSASVGDRVTITCRA
SQDVNTAVAWYQQKPGKAPKLLIYSASFLYSGVPSRESGS
RSGTDFTLTISSLOPEDFATYYCQQHYTTPPTFGQGTKVE
IK,

wherein X₁ is Ala, Arg, Asn, Asp, Gln, Glu, Gly, His, Leu, Lys, Met, Phe, Thr, Val, or not present, X₂ is Ala or Lys, X₃ is Asn or Leu, X₄ is Pro or His, X₅ is Phe, Trp, Tyr or Val, X₆ is Lys or Asp, X₇ is Ala or Arg, X₈ is Lys, Arg, or Glu, X₉ is Lys, Ala, Arg, or Glu, X₁₀ is Leu or Met, X₁₁ is Pro, Asn, Asp, His, Glu, Gly, Ser or Thr, X₁₂ is Gln or His, X₁₃ is Arg or Lys, X₁₄ is Asp or Pro, X₁₅ is Ala, Glu or Lys, X₁₆ is Gly or Asp, X₁₇ is Gln or His, X₁₈ is Gln, Arg, or Lys, X₁₉ is Ala, Cys, Ile, Ser, Val, or Leu, X₂₀ is Gln, Leu, Glu, Phe, His, Ile, Leu, or Tyr, X₂₁ is Ala or Val, X₂₂ is Cys or Gly, X₂₃ is Arg or Pro, X₂₄ is Ala or Gly, X₂₅ is Arg, Ile, or Lys, X₂₆ is Gln or Pro, X₂₇ is Arg or Pro, X₂₈ is Ala, Cys, Leu, or Val, X₂₉ is Ala, Cys, Asn, Ser, or Thr, X₃₀ is Leu, Ala, or Val, X₃₁ is Glu or Pro, X₃₂ is His or Pro, X₃₃ is Leu, Asp, Asn, or Tyr, X₃₄ is Arg, Ala, Asp, Leu, Gln, or Tyr, X₃₅ is Ala, Cys, Phe, Gly, His, Ile, Lys, Leu, Met, Asn, Gln, Arg, Ser, Val, Trp, or Tyr, X₃₆ is Val, Ile, or Lys, X₃₇ is Thr or Ala, X₃₈ is Asp or Gly, X₃₉ is Glu, Lys, or Pro, X₄₀ is Ser or Cys, X₄₁ is Leu, Asp, Phe, Gln, or Thr, X₄₂ is Val or Phe, X₄₃ is Gln, Ala, His, Phe, Pro, Ser, or Thr, X₄₄ is Cys or Val, X₄₅ is Trp or Arg, X₄₆ is Ser, Arg, Ala, Asp, Glu, Phe, Gly, His, Ile, Lys, Leu, Met, Asn, Pro, Gln, Thr, Val, Trp, or Tyr, X₄₇ is Trp, Lys, Ala, Asp, Glu, Phe, Gly, His, Ile, Lys, Leu, Met, Asn, Pro, Gln, Arg, Ser, Thr, Val, or Tyr, X₄₈ is Lys or Val, X₄₉ is Ala, Cys, Ser, or Val, X₅₀ is Cys, Leu, or Val, X₅₁ is Val or Arg, X₅₂ is Leu, Gln, His, Ile, Lys, or Ser, and X₅₃ is GGGGS (SEQ ID NO: 184), GGGGSGGGGS (SEQ ID NO: 145), or EPKSS (SEQ ID NO: 146), and the sialidase comprises at least one mutation relative to wild-type human Neu2 (SEQ ID NO: 1).

[0182] In certain embodiments, the first and/or second polypeptide comprises the amino acid sequence of

(SEQ ID NO: 247)
X₁ASLPX₂LQX₃ESVFQSGAHAYRIPALLYLPGQQSLLAF
AEQRX₄SKKDEHAELIVLRRGDYDAX₅THQVQWQAQEVVA
QARLDGHRSMNPCPLYDX₆QTGTLFLFFIAIPGQVTEQQQ
LQTRANVTRLCX₇VTSTDHGRTWSSPRDLTDAAIGPAYRE
WSTFAVGPGHCLQLHDRARSLVVPAYAYRKLHPX₈QRPIP
SAFCFLSHDHGRTWARGHFVAQDTLECQVAEVETGEQRVV
TLNARSHLRX₉RVQAQSTNDGLDFQESQLVKKLVEPPPX₁₀
GCQGSVISFPSPRSGPGSPAQWLLYTHPTHX₁₁X₁₂QRA
DLGAYLNPRPPAPEAWSEPVLLAKGSX₁₃AYSDLQSMGTG
PDGSPLFGCLYEANDYEEIX₁₄FX₁₅MFTLKQAFPAEYLP
QX₁₆DKTHTCPPCPAPELLGGPSVELFPPKPKDTLMISRT
PEVTCVVVDVSHEDPEVKENWYVDGVEVHNAKTKPREEQY
NSTYRVVSVLTVLHQDWLNGKEYKCKVSNKALPAPIEKTI
SKAKGQPREPQVYTLPPSREEMTKNQVSLTCLVKGFYPSD
IAVEWESNGQPENNYKTTPPVLDSDGSFFLYSKLTVDKSR
WQQGNVFSCSVMHEALHNHYTQKSLSLSPGKGGGGSGGGG
SGGGGSEVQLVESGGGLVQPGGSLRLSCAASGENIKDTYI
HWVRQAPGKGLEWVARIYPTNGYTRYADSVKGRFTISADT
SKNTAYLQMNSLRAEDTAVYYCSRWGGDGFYAMDYWGQGT
LVTVSSGGGGSGGGGSGGGGSDIQMTQSPSSLSASVGDRV
TITCRASQDVNTAVAWYQQKPGKAPKLLIYSASFLYSGVP
SRESGSRSGTDFTLTISSLOPEDFATYYCQQHYTTPPTFG
QGTKVEIK,

wherein X₁ is Ala, Arg, Asn, Asp, Gln, Glu, Gly, His, Leu, Lys, Met, Phe, Thr, Val, or not present, X₂ is Phe, Trp, Tyr or Val, X₃ is Lys or Asp, X₄ is Arg or Ala, X₅ is Pro, Asn, Asp, His, Glu, Gly, Ser or Thr, X₆ is Ala, Glu, or Lys, X₇ is Gln, Leu, Glu, Phe, His, Ile, Leu, or Tyr, X₈ is Arg, Ile, or Lys, X₉ is Ala, Cys, Phe, Gly, His, Ile, Lys, Leu, Met, Asn, Gln, Arg, Ser, Val, Trp, or Tyr, X₁₀ is Gln, Ala, His, Phe, Pro, Ser, or Thr, X₁₁ is Ser, Arg, Ala, Asp, Glu, Phe, Gly, His, Ile, Lys, Leu, Met, Asn, Pro, Gln, Thr, Val, Trp, or Tyr, X₁₂ is Trp, Lys, Ala, Asp, Glu, Phe, Gly, His, Ile, Lys, Leu, Met, Asn, Pro, Gln, Arg, Ser, Thr, Val, or Tyr, X₁₃ is Ala, Cys, Ser, or Val, X₁₄ is Val or Arg, X₁₅ is Leu, Gln, His, Ile, Lys, or Ser, and X₁₆ is GGGGS (SEQ ID NO: 184), GGGGSGGGGS (SEQ ID NO: 145), or EPKSS (SEQ ID NO: 146), and the sialidase comprises at least one mutation relative to wild-type human Neu2 (SEQ ID NO: 1). In certain embodiments, X₁ is Ala, Asp, Met, or not present, X₂ is Tyr or Val, X₃ is Lys or Asp, X₄ is Arg or Ala, X₅ is Pro, Asn, Gly, Ser or Thr, X₆ is Ala or Glu, X₇ is Gln or Tyr, X₈ is Ile or Lys, X₉ is Ala or Thr, X₁₀ is Gln, Ala, or Thr, X₁₁ is Ser, Arg, or Ala, X₁₂ is Trp, Lys, or Arg, X₁₃ is Ala or Cys, X₁₄ is Val or Arg, and X₁₅ is Leu or Ile.

[0183] In certain embodiments, the first and second polypeptide comprise SEQ ID NO: 77. In certain embodiments, the first and second polypeptide comprise SEQ ID NO: 78. In certain embodiments, the first and second polypeptide comprise SEQ ID NO: 79. In certain embodiments, the first and second polypeptide comprise SEQ ID NO: 80. In certain embodiments, the first and second polypeptide comprise SEQ ID NO: 81. In certain embodiments, the first and second polypeptide comprise SEQ ID NO: 82. In certain embodiments, the first and second polypeptide comprise SEQ ID NO: 83. In certain embodiments, the first and second polypeptide comprise SEQ ID NO: 166. In certain embodiments, the first and second polypeptide comprise SEQ ID NO: 167. In certain embodiments, the first and second polypeptide comprise SEQ ID NO: 168. In certain embodiments, the first and second polypeptide comprise SEQ ID NO: 169. In certain embodiments, the first and second polypeptide comprise SEQ ID NO: 170. In certain embodiments, the first and second polypeptide comprise SEQ ID NO: 171. In certain embodiments, the first and second polypeptide comprise SEQ ID NO: 172. In certain embodiments, the first and second polypeptide comprise SEQ ID NO: 173. In certain embodiments, the first and second polypeptide comprise SEQ ID NO: 174. In certain embodiments, the first and second polypeptide comprise SEQ ID NO: 175. In certain embodiments, the first and second polypeptide comprise SEQ ID NO: 176. In certain embodiments, the first and second polypeptide comprise SEQ ID NO: 177. In certain embodiments, the first and second polypeptide comprise SEQ ID NO: 178. In certain embodiments, the first and second polypeptide comprise SEQ ID NO: 194. In certain embodiments, the first and second polypeptide comprise SEQ ID NO: 197. In certain embodiments, the first and second polypeptide comprise SEQ ID NO: 244. In certain embodiments, the first and second polypeptide comprise SEQ ID NO: 249.

[0184] In certain embodiments, the antibody conjugate comprises: a first polypeptide comprising an immunoglobulin light chain; a second polypeptide comprising an immunoglobulin heavy chain and a single chain variable fragment (scFv) (it is also understood that the scFv may be replaced by a first polypeptide chain of an immunoglobulin antigen binding fragment, e.g., Fab fragment); and a third polypeptide comprising an immunoglobulin Fc domain and a sialidase. An example of this embodiment is shown in FIG. 3D. The first and second polypeptides can be covalently linked together and the second and third polypeptides can be covalently linked together. The covalent linkages can be disulfide bonds. In certain embodiments, the first polypeptide and the second polypeptide together define a first anti-HER2 antigen-binding site (i.e., the immunoglobulin light chain and immunoglobulin heavy chain together define a first anti-HER2 antigen-binding site). In certain embodiments, the scFv defines a second anti-HER2 antigen-binding site. In certain embodiments, the second polypeptide comprises the immunoglobulin heavy chain and the scFv in an N- to C-terminal orientation, or the scFv and the immunoglobulin heavy chain in an N- to C-terminal orientation. In certain embodiments, the third polypeptide comprises the sialidase and the immunoglobulin Fc domain in an N- to C-terminal orientation, or the sialidase and the immunoglobulin Fc domain in an N- to C-terminal orientation.

[0185] In certain embodiments, the antibody conjugate comprises a first polypeptide comprising a first immunoglobulin light chain; a second polypeptide comprising a first sialidase, a first immunoglobulin Fc domain, and a first immunoglobulin heavy chain variable region; a third polypeptide comprising a second sialidase, a second immunoglobulin Fc domain, and a second immunoglobulin heavy chain variable region; and a fourth polypeptide comprising a second immunoglobulin light chain. It is also understood that an immunoglobulin light chain may be replaced by an immunoglobulin heavy chain variable region and an immunoglobulin heavy chain variable region may be replaced by an immunoglobulin light chain (e.g., the antibody conjugate may comprise a first polypeptide comprising a first immunoglobulin heavy chain variable region; a second polypeptide comprising a first sialidase, a first immunoglobulin Fc domain, and a first immunoglobulin light chain; a third polypeptide comprising a second sialidase, a second immunoglobulin Fc domain, and a second immunoglobulin light chain; and a fourth polypeptide comprising a second immunoglobulin heavy chain variable region). An example of this embodiment is shown in FIG. 3E. The second and third polypeptides can be covalently linked together. The covalent linkages can be disulfide bonds. In certain embodiments, the first and second polypeptides define a first anti-HER2 antigen-binding site, and the third and fourth polypeptides define a second anti-HER2 antigen-binding site. In certain embodiments, the second polypeptide comprises the first sialidase, the first immunoglobulin Fc domain, and the first immunoglobulin heavy chain variable region in an N- to C-terminal orientation. In certain embodiments, the third polypeptide comprises the second sialidase, the second immunoglobulin Fc domain, and the second immunoglobulin heavy chain variable region in an N- to C-terminal orientation.

[0186] In certain embodiments, the antibody conjugate has a molecular weight from about 135 kDa to about 165 kDa, e.g., about 140 kDa. In other embodiments, the antibody conjugate has a molecular weight from about 215 kDa to about 245 kDa, e.g., about 230 kDa.

[0187] In certain embodiments, the antibody conjugate comprises two polypeptides that each comprise an immunoglobulin Fc domain, and the first polypeptide has either a “knob” mutation, e.g., T366Y, or a “hole” mutation, e.g., Y407T, for heterodimerization with the second polypeptide, and the second polypeptide has either a respective “knob” mutation, e.g., T366Y, or a “hole” mutation, e.g., Y407T, for heterodimerization with the first polypeptide (residue numbers according to EU numbering, Kabat, E. A., et al. (1991) supra). For example, in certain embodiments, the antibody comprises two polypeptides that each comprise an immunoglobulin Fc domain derived from human IgG1 Fc domain, and the first polypeptide comprises a Y407T mutation (e.g., the first polypeptide comprises SEQ ID NO: 32 or SEQ ID NO: 147, SEQ ID NO: 213, or SEQ ID NO: 215), and the second polypeptide comprises a T366Y mutation (e.g., the second polypeptide comprises SEQ ID NO: 33, SEQ ID NO: 148, SEQ ID NO: 214, or SEQ ID NO: 216).

[0188] As used herein, the term “multispecific antibody” is understood to mean an antibody that specifically binds to at least two different antigens, i.e., an antibody that comprises at least two antigen-binding sites that bind to at least two different antigens. As used herein, the term “bispecific antibody” is understood to mean an antibody that specifically binds to two different antigens, i.e., an antibody that comprises two antigen-binding sites each of which bind to separate and distinct antigens. In other words, a first binding site binds a first antigen and a second binding site binds a second, different antigen. A multispecific or bispecific antibody may, for example, be a human or humanized antibody, and/or be a full length antibody or an antibody fragment (e.g., a F(ab′)2 bispecific antibody).

[0189] The present invention encompasses antibody conjugates comprising antibody fragments, which may be generated by traditional means, such as enzymatic digestion, or by recombinant techniques. For a review of certain antibody fragments, see Hudson et al. (2003) supra.

[0190] In certain embodiments, the antibody conjugate or fusion protein can be covalently or non-covalently associated with a biological modifier, wherein the biological modifier can be used to enhance the solubility of the antibody, increase binding specificity, decrease immunogenicity or toxicity or modify the pharmacokinetic profile of the antibody. For example, the biological modifier can be used to increase the molecular weight of the antibody to increase its circulating half-life.

[0191] It is contemplated that the antibody conjugate or fusion protein may be covalently bound to one or more (for example, 2, 3, 4, 5, 6, 8, 9, 10 or more) biological modifiers that may comprise linear or branched polymers. Exemplary biological modifiers may include, for example, a variety of polymers, such as those described in U.S. Pat. No. 7,842,789. Particularly useful are polyalkylene ethers such as polyethylene glycol (PEG) and derivatives thereof (for example, alkoxy polyethylene glycol, for example, methoxypolyethylene glycol, ethoxypolyethylene glycol and the like); block copolymers of polyoxyethylene and polyoxypropylene (Pluronics); polymethacrylates; carbomers; and branched or unbranched polysaccharides which comprise the saccharide monomers such as D-mannose, D- and L-galactose, fucose, fructose, D-xylose, L-arabinose, and D-glucuronic acid.

[0192] In other embodiments, the biological modifier can be a hydrophilic polyvinyl polymer such as polyvinyl alcohol and polyvinylpyrrolidone (PVP)-type polymers. The biological modifier can be a functionalized polyvinylpyrrolidone, for example, carboxy or amine functionalized on one (or both) ends of the polymer (as available from PolymerSource). Alternatively, the biological modifier can include Poly N-(2-hydroxypropyl)methacrylamide (HPMA), or functionalized HPMA (amine, carboxy, etc.), Poly(N-isopropylacrylamide) or functionalized poly(N-isopropylacrylamide). Alternatively, the biological modifier can include Poly N-(2-hydroxypropyl)methacrylamide (HPMA), or functionalized HPMA (amine, carboxy, etc.), Poly(N-isopropylacrylamide) or functionalized poly(N-isopropylacrylamide). The modifier prior to conjugation need not be, but preferably is, water soluble, but the final conjugate should be water soluble.

[0193] In general, the biological modifier may have a molecular weight from about 2 kDa to about 5 kDa, from about 2 kDa to about 10 kDa, from about 2 kDa to about 20 kDa, from about 2 kDa to about 30 kDa, from about 2 kDa to about 40 kDa, from about 2 kDa to about 50 kDa, from about 2 kDa to about 60 kDa, from about 2 kDa to about 70 kDa, from about 2 kDa to about 80 kDa, from about 2 kDa to about 90 kDa, from about 2 kDa to about 100 kDa, from about 2 kDa to about 150 kDa, from about 5 kDa to about 10 kDa, from about 5 kDa to about 20 kDa, from about 5 kDa to about 30 kDa, from about 5 kDa to about 40 kDa, from about 5 kDa to about 50 kDa, from about 5 kDa to about 60 kDa, from about 5 kDa to about 70 kDa, from about 5 kDa to about 80 kDa, from about 5 kDa to about 90 kDa, from about 5 kDa to about 100 kDa, from about 5 kDa to about 150 kDa, from about 10 kDa to about 20 kDa, from about 10 kDa to about 30 kDa, from about 10 kDa to about 40 kDa, from about 10 kDa to about 50 kDa, from about 10 kDa to about 60 kDa, from about 10 kDa to about 70 kDa, from about 10 kDa to about 80 kDa, from about 10 kDa to about 90 kDa, from about 10 kDa to about 100 kDa, from about 10 kDa to about 150 kDa, from about 20 kDa to about 30 kDa, from about 20 kDa to about 40 kDa, from about 20 kDa to about 50 kDa, from about 20 kDa to about 60 kDa, from about 20 kDa to about 70 kDa, from about 20 kDa to about 80 kDa, from about 20 kDa to about 90 kDa, from about 20 kDa to about 100 kDa, from about 20 kDa to about 150 kDa, from about 30 kDa to about 40 kDa, from about 30 kDa to about 50 kDa, from about 30 kDa to about 60 kDa, from about 30 kDa to about 70 kDa, from about 30 kDa to about 80 kDa, from about 30 kDa to about 90 kDa, from about 30 kDa to about 100 kDa, from about 30 kDa to about 150 kDa, from about 40 kDa to about 50 kDa, from about 40 kDa to about 60 kDa, from about 40 kDa to about 70 kDa, from about 40 kDa to about 80 kDa, from about 40 kDa to about 90 kDa, from about 40 kDa to about 100 kDa, from about 40 kDa to about 150 kDa, from about 50 kDa to about 60 kDa, from about 50 kDa to about 70 kDa, from about 50 kDa to about 80 kDa, from about 50 kDa to about 90 kDa, from about 50 kDa to about 100 kDa, from about 50 kDa to about 150 kDa, from about 60 kDa to about 70 kDa, from about 60 kDa to about 80 kDa, from about 60 kDa to about 90 kDa, from about 60 kDa to about 100 kDa, from about 60 kDa to about 150 kDa, from about 70 kDa to about 80 kDa, from about 70 kDa to about 90 kDa, from about 70 kDa to about 100 kDa, from about 70 kDa to about 150 kDa, from about 80 kDa to about 90 kDa, from about 80 kDa to about 100 kDa, from about 80 kDa to about 150 kDa, from about 90 kDa to about 100 kDa, from about 90 kDa to about 150 kDa, or from about 100 kDa to about 150 kDa.

[0194] It is contemplated that the antibody conjugate or fusion protein is attached to about 10 or fewer polymer molecules (e.g., 9, 8, 7, 6, 5, 4, 3, 2, or 1), each polymer molecule having a molecular weight of at least about 20,000 D, or at least about 30,000 D, or at least about 40,000 D.

[0195] Although a variety of polymers can be used as biological modifiers, it is contemplated that the antibody conjugates or fusion proteins described herein may be attached to polyethylene glycol (PEG) polymers. In one embodiment, the antibody conjugate or fusion protein described herein is covalently attached to at least one PEG having an actual MW of at least about 20,000 D. In another embodiment, the antibody conjugate or fusion protein described herein is covalently attached to at least one PEG having an actual MW of at least about 30,000 D. In another embodiment, the antibody conjugate or fusion protein described herein is covalently attached to at least one PEG having an actual MW of at least about 40,000 D. In certain embodiments, the PEG is methoxyPEG(5000)-succinimidylpropionate (mPEG-SPA), methoxyPEG(5000)-succinimidylsuccinate (mPEG-SS). Such PEGS are commercially available from Nektar Therapeutics or SunBiowest.

[0196] Attachment sites on an antibody conjugate or fusion protein for a biological modifier include the N-terminal amino group and epsilon amino groups found on lysine residues, as well as other amino, imino, carboxyl, sulfhydryl, hydroxyl or other hydrophilic groups. The polymer may be covalently bonded directly to the antibody conjugate or fusion protein with or without the known use of a multifunctional (ordinarily bifunctional) crosslinking agent using chemistries and used in the art. For example, sulfhydryl groups can be derivatized by coupling to maleimido-substituted PEG (e.g., alkoxy-PEG amine plus sulfosuccinimidyl 4-(N-maleimidomethyl)cyclohexane-1-carboxylate), or PEG-maleimide commercially available from Shearwater Polymers, Inc., Huntsville, Ala.).

### II. Methods of Making a Fusion Protein or Antibody Conjugate

[0197] Methods for producing fusion proteins, e.g., those disclosed herein, antibodies, or antibody conjugates, e.g., those disclosed herein, are known in the art. For example, DNA molecules encoding light chain variable regions and/or heavy chain variable regions can be synthesized chemically or by recombinant DNA methodologies. For example, the sequences of the antibodies can be cloned from hybridomas by conventional hybridization techniques or polymerase chain reaction (PCR) techniques, using the appropriate synthetic nucleic acid primers. The resulting DNA molecules encoding the variable regions of interest can be ligated to other appropriate nucleotide sequences, including, for example, constant region coding sequences, and expression control sequences, to produce conventional gene expression constructs (i.e., expression vectors) encoding the desired antibodies. Production of defined gene constructs is within routine skill in the art.

[0198] Nucleic acids encoding desired fusion proteins, and/or antibody conjugates can be incorporated (ligated) into expression vectors, which can be introduced into host cells through conventional transfection or transformation techniques. Exemplary host cells are E. coli cells, Chinese hamster ovary (CHO) cells, human embryonic kidney 293 (HEK 293) cells, HeLa cells, baby hamster kidney (BHK) cells, monkey kidney cells (COS), human hepatocellular carcinoma cells (e.g., Hep G2), and myeloma cells that do not otherwise produce IgG protein. Transformed host cells can be grown under conditions that permit the host cells to express the genes that encode the immunoglobulin light and/or heavy chain variable regions.

[0199] Specific expression and purification conditions will vary depending upon the expression system employed. For example, if a gene is to be expressed in E. coli, it is first cloned into an expression vector by positioning the engineered gene downstream from a suitable bacterial promoter, e.g., Trp or Tac, and a prokaryotic signal sequence. The expressed protein may be secreted. The expressed protein may accumulate in refractile or inclusion bodies, which can be harvested after disruption of the cells by French press or sonication. The refractile bodies then are solubilized, and the protein may be refolded and/or cleaved by methods known in the art.

[0200] If the engineered gene is to be expressed in eukaryotic host cells, e.g., CHO cells, it is first inserted into an expression vector containing a suitable eukaryotic promoter, a secretion signal, a poly A sequence, and a stop codon. Optionally, the vector or gene construct may contain enhancers and introns. In embodiments involving fusion proteins comprising an antibody or portion thereof, the expression vector optionally contains sequences encoding all or part of a constant region, enabling an entire, or a part of, a heavy or light chain to be expressed. The gene construct can be introduced into eukaryotic host cells using conventional techniques.

[0201] The host cells express a fusion protein and/or antibody conjugate comprising a sialidase and V_{L} or V_{H} fragments, V_{L}-V_{H} heterodimers, V_{H}-V_{L} or V_{L}-V_{H} single chain polypeptides, complete heavy or light immunoglobulin chains, or portions thereof, each of which may be attached to a moiety having another function (e.g., cytotoxicity). In some embodiments involving fusion proteins and/or antibody conjugates, a host cell is transfected with a single vector expressing a polypeptide expressing a sialidase and an entire, or part of, a heavy chain (e.g., a heavy chain variable region) or a sialidase and a light chain (e.g., a light chain variable region), or a polypeptide expressing an entire, or part of, a heavy chain (e.g., a heavy chain variable region) or a light chain (e.g., a light chain variable region). In some embodiments, a host cell is transfected with a single vector encoding (a) a polypeptide comprising a heavy chain variable region and a polypeptide comprising a light chain variable region, or (b) an entire immunoglobulin heavy chain and an entire immunoglobulin light chain, wherein in (a) or in (b), the polypeptide may also comprise a sialidase. In some embodiments, a host cell is co-transfected with more than one expression vector (e.g., one expression vector expressing a polypeptide comprising an entire, or part of, a heavy chain or heavy chain variable region, optionally comprising a sialidase fused thereto, and another expression vector expressing a polypeptide comprising an entire, or part of, a light chain or light chain variable region, optionally comprising a sialidase fused thereto).

[0202] A polypeptide comprising a fusion protein, e.g., a fusion protein comprising an immunoglobulin heavy chain variable region or light chain variable region, can be produced by growing (culturing) a host cell transfected with an expression vector encoding such a variable region, under conditions that permit expression of the polypeptide. Following expression, the polypeptide can be harvested and purified or isolated using techniques known in the art, e.g., affinity tags such as glutathione-S-transferase (GST) or histidine tags.

[0203] In embodiments in which a fusion protein and/or antibody conjugate is produced, a sialidase fused to a monoclonal antibody, Fc domain, or an antigen-binding domain of the antibody, can be produced by growing (culturing) a host cell transfected with: (a) an expression vector that encodes a complete or partial immunoglobulin heavy chain, and a separate expression vector that encodes a complete or partial immunoglobulin light chain; or (b) a single expression vector that encodes both chains (e.g., complete or partial heavy and light chains), under conditions that permit expression of both chains. The sialidase will be fused to one or more of the chains. The intact fusion protein and/or antibody conjugate can be harvested and purified or isolated using techniques known in the art, e.g., Protein A, Protein G, affinity tags such as glutathione-S-transferase (GST) or histidine tags. It is within ordinary skill in the art to express the heavy chain and the light chain from a single expression vector or from two separate expression vectors.

[0204] In certain embodiments, in order to express a protein, e.g., a fusion protein, as a secreted protein, a native N-terminal signal sequence of the protein is replaced, e.g., with MDMRVPAQLLGLLLLWLPGARC (SEQ ID NO: 28). In certain embodiments, to express a protein, e.g., a fusion protein, as a secreted protein, an N-terminal signal sequence, e.g., MDMRVPAQLLGLLLLWLPGARC (SEQ ID NO: 28), is added. Additional exemplary N-terminal signal sequences include signal sequences from interleukin-2, CD-5, IgG kappa light chain, trypsinogen, serum albumin, and prolactin. In certain embodiments, in order to express a protein, e.g., a fusion protein, as a secreted protein, a C terminal lysosomal signal motif, e.g., YGTL (SEQ ID NO: 29) is removed.

[0205] Methods for reducing or eliminating the antigenicity of antibodies and antibody fragments are known in the art. When the antibodies are to be administered to a human, the antibodies preferably are “humanized” to reduce or eliminate antigenicity in humans. Preferably, each humanized antibody has the same or substantially the same affinity for the antigen as the non-humanized mouse antibody from which it was derived.

[0206] In one humanization approach, chimeric proteins are created in which mouse immunoglobulin constant regions are replaced with human immunoglobulin constant regions. See, e.g., Morrison et al., 1984, PROC. NAT. ACAD. SCI. 81:6851-6855, Neuberger et al., 1984, NATURE 312:604-608; U.S. Pat. No. 6,893,625 (Robinson); U.S. Pat. No. 5,500,362 (Robinson); and U.S. Pat. No. 4,816,567 (Cabilly).

[0207] In an approach known as CDR grafting, the CDRs of the light and heavy chain variable regions are grafted into frameworks from another species. For example, murine CDRs can be grafted into human FRs. In some embodiments, the CDRs of the light and heavy chain variable regions of an antibody are grafted into human FRs or consensus human FRs. To create consensus human FRs, FRs from several human heavy chain or light chain amino acid sequences are aligned to identify a consensus amino acid sequence. CDR grafting is described in U.S. Pat. No. 7,022,500 (Queen); U.S. Pat. No. 6,982,321 (Winter); U.S. Pat. No. 6,180,370 (Queen); U.S. Pat. No. 6,054,297 (Carter); U.S. Pat. No. 5,693,762 (Queen); U.S. Pat. No. 5,859,205 (Adair); U.S. Pat. No. 5,693,761 (Queen); U.S. Pat. No. 5,565,332 (Hoogenboom); U.S. Pat. No. 5,585,089 (Queen); U.S. Pat. No. 5,530,101 (Queen); Jones et al. (1986) NATURE 321: 522-525; Riechmann et al. (1988) NATURE 332: 323-327; Verhoeyen et al. (1988) SCIENCE 239: 1534-1536; and Winter (1998) FEBS LETT 430: 92-94.

[0208] In an approach called “SUPERHUMANIZATION™,” human CDR sequences are chosen from human germline genes, based on the structural similarity of the human CDRs to those of the mouse antibody to be humanized. See, e.g., U.S. Pat. No. 6,881,557 (Foote); and Tan et al., 2002, J. IMMUNOL. 169:1119-1125.

[0209] Other methods to reduce immunogenicity include “reshaping,” “hyperchimerization,” and “veneering/resurfacing.” See, e.g., Vaswami et al., 1998, ANNALS OF ALLERGY, ASTHMA, & IMMUNOL. 81:105; Roguska et al., 1996, PROT. ENGINEER 9:895-904; and U.S. Pat. No. 6,072,035 (Hardman). In the veneering/resurfacing approach, the surface accessible amino acid residues in the murine antibody are replaced by amino acid residues more frequently found at the same positions in a human antibody. This type of antibody resurfacing is described, e.g., in U.S. Pat. No. 5,639,641 (Pedersen).

[0210] Another approach for converting a mouse antibody into a form suitable for medical use in humans is known as ACTIVMAB™ technology (Vaccinex, Inc., Rochester, NY), which involves a vaccinia virus-based vector to express antibodies in mammalian cells. High levels of combinatorial diversity of IgG heavy and light chains can be produced. See, e.g., U.S. Pat. No. 6,706,477 (Zauderer); U.S. Pat. No. 6,800,442 (Zauderer); and U.S. Pat. No. 6,872,518 (Zauderer). Another approach for converting a mouse antibody into a form suitable for use in humans is technology practiced commercially by KaloBios Pharmaceuticals, Inc. (Palo Alto, CA). This technology involves the use of a proprietary human “acceptor” library to produce an “epitope focused” library for antibody selection. Another approach for modifying a mouse antibody into a form suitable for medical use in humans is HUMAN ENGINEERING™ technology, which is practiced commercially by XOMA (US) LLC. See, e.g., International (PCT) Publication No. WO 93/11794 and U.S. Pat. No. 5,766,886 (Studnicka); U.S. Pat. No. 5,770,196 (Studnicka); U.S. Pat. No. 5,821,123 (Studnicka); and U.S. Pat. No. 5,869,619 (Studnicka).

[0211] Any suitable approach, including any of the above approaches, can be used to reduce or eliminate human immunogenicity of an antibody.

[0212] In addition, it is possible to create fully human antibodies in mice. Fully human mAbs lacking any non-human sequences can be prepared from human immunoglobulin transgenic mice by techniques referenced in, e.g., Lonberg et al., NATURE 368:856-859, 1994; Fishwild et al., NATURE BIOTECHNOLOGY 14:845-851, 1996; and Mendez et al., NATURE GENETICS 15:146-156, 1997. Fully human monoclonal antibodies can also be prepared and optimized from phage display libraries by techniques referenced in, e.g., Knappik et al., J. MOL. BIOL. 296:57-86, 2000; and Krebs et al., J. IMMUNOL. METH. 254:67-842001).

[0213] The present invention encompasses fusion proteins comprising antibody fragments, which may be generated by traditional means, such as enzymatic digestion, or by recombinant techniques. For a review of certain antibody fragments, see Hudson et al. (2003) NAT. MED. 9:129-134.

[0214] Various techniques have been developed for the production of antibody fragments. Traditionally, these fragments were derived via proteolytic digestion of intact antibodies (see, e.g., Morimoto et al. (1992) JOURNAL OF BIOCHEMICAL AND BIOPHYSICAL METHODS 24:107-117; and Brennan et al. (1985) SCIENCE 229:81). However, these fragments can now be produced directly by recombinant host cells. Fab, Fv and ScFv antibody fragments can all be expressed in and secreted from E. coli, thus allowing the facile production of large amounts of these fragments. Antibody fragments can be isolated from the antibody phage libraries. Alternatively, Fab′-SH fragments can be directly recovered from E. coli and chemically coupled to form F(ab′)₂ fragments (Carter et al. (1992) Bio/TECHNOLOGY 10:163-167). According to another approach, F(ab′)₂ fragments can be isolated directly from recombinant host cell culture. Fab and F(ab′)₂ fragments with increased in vivo half-life comprising salvage receptor binding epitope residues are described in U.S. Pat. No. 5,869,046. Other techniques for the production of antibody fragments will be apparent to the skilled practitioner. In certain embodiments, an antibody is a single chain Fv fragment (scFv). See U.S. Pat. Nos. 5,571,894 and 5,587,458.

[0215] Methods for making bispecific antibodies are known in the art. See Milstein and Cuello (1983) NATURE 305:537, International (PCT) Publication No. WO93/08829, and Traunecker et al. (1991) EMBO J., 10:3655. For further details of generating bispecific antibodies see, for example, Suresh et al. (1986) METHODS ENZYMOL. 121:210. Bispecific antibodies include cross-linked or “heteroconjugate” or “heterodimer” antibodies. For example, one of the antibodies in the heterodimer can be coupled to avidin, the other to biotin. Heterodimer antibodies may be made using any convenient cross-linking method. Suitable cross-linking agents are well known in the art, and are disclosed in U.S. Pat. No. 4,676,980, along with a number of cross-linking techniques.

[0216] Examples of heterodimeric or asymmetric IgG-like molecules include but are not limited to those obtained with the following technologies or using the following formats: Triomab/Quadroma, Knobs-into-Holes, CrossMabs, electrostatically-matched antibodies, LUZ-Y, Strand Exchange Engineered Domain body, Biclonic and DuoBody.

[0217] Advantages of using antibody fragments (e.g., F(ab) and F(ab′)₂ fragments) include the elimination of non-specific binding between Fc portions of antibodies and Fc receptors on cells (such as macrophages, dendritic cells, neutrophils, NK cells and B cells). In addition, they may be able to penetrate tissues more efficiently due to their smaller size.

[0218] Heterodimeric antibodies, or asymmetric antibodies, allow for greater flexibility and new formats for attaching a variety of drugs to the antibody arms. One of the general formats for creating a heterodimeric antibody is the “knobs-into-holes” format. This format is specific to the heavy chain part of the constant region in antibodies. The “knobs” part is engineered by replacing a small amino acid with a larger one, which fits into a “hole”, which is engineered by replacing a large amino acid with a smaller one. What connects the “knobs” to the “holes” are the disulfide bonds between each chain. The “knobs-into-holes” shape facilitates antibody dependent cell mediated cytotoxicity. Single chain variable fragments (scFv) are connected to the variable domain of the heavy and light chain via a short linker peptide. The linker is rich in glycine, which gives it more flexibility, and serine/threonine, which gives it specificity. Two different scFv fragments can be connected together, via a hinge region, to the constant domain of the heavy chain or the constant domain of the light chain. This gives the antibody bispecificity, allowing for the binding specificities of two different antigens. The “knobs-into-holes” format enhances heterodimer formation but doesn't suppress homodimer formation.

[0219] Several approaches to support heterodimerization have been described, for example in International (PCT) Publication Nos. WO96/27011, WO98/050431, WO2007/110205, WO2007/147901, WO2009/089004, WO2010/129304, WO2011/90754, WO2011/143545, WO2012/058768, WO2013/157954, and WO2013/096291, and European Patent Publication No. EP1870459. Typically, in the approaches known in the art, the CH₃ domain of the first heavy chain and the CH₃ domain of the second heavy chain are both engineered in a complementary manner so that the heavy chain comprising one engineered CH₃ domain can no longer homodimerize with another heavy chain of the same structure (e.g., a CH₃-engineered first heavy chain can no longer homodimerize with another CH₃-engineered first heavy chain; and a CH₃-engineered second heavy chain can no longer homodimerize with another CH₃-engineered second heavy chain). Thereby the heavy chain comprising one engineered CH₃ domain is forced to heterodimerize with another heavy chain comprising the CH₃ domain, which is engineered in a complementary manner. As a result, the CH₃ domain of the first heavy chain and the CH₃ domain of the second heavy chain are engineered in a complementary manner by amino acid substitutions, such that the first heavy chain and the second heavy chain are forced to heterodimerize, whereas the first heavy chain and the second heavy chain can no longer homodimerize (e.g., for steric reasons).

### III. Pharmaceutical Compositions

[0220] For therapeutic use, a fusion protein and/or antibody conjugate preferably is combined with a pharmaceutically acceptable carrier. The term “pharmaceutically acceptable” as used herein refers to those compounds, materials, compositions, and/or dosage forms which are, within the scope of sound medical judgment, suitable for use in contact with the tissues of human beings and animals without excessive toxicity, irritation, allergic response, or other problem or complication, commensurate with a reasonable benefit/risk ratio.

[0221] The term “pharmaceutically acceptable carrier” as used herein refers to buffers, carriers, and excipients suitable for use in contact with the tissues of human beings and animals without excessive toxicity, irritation, allergic response, or other problem or complication, commensurate with a reasonable benefit/risk ratio. Pharmaceutically acceptable carriers include any of the standard pharmaceutical carriers, such as a phosphate buffered saline solution, water, emulsions (e.g., such as an oil/water or water/oil emulsions), and various types of wetting agents. The compositions also can include stabilizers and preservatives. For examples of carriers, stabilizers and adjuvants, see, e.g., Martin, Remington's Pharmaceutical Sciences, 15th Ed., Mack Publ. Co., Easton, PA [1975]. Pharmaceutically acceptable carriers include buffers, solvents, dispersion media, coatings, isotonic and absorption delaying agents, and the like, that are compatible with pharmaceutical administration. The use of such media and agents for pharmaceutically active substances is known in the art.

[0222] In certain embodiments, a pharmaceutical composition may contain formulation materials for modifying, maintaining or preserving, for example, the pH, osmolarity, viscosity, clarity, color, isotonicity, odor, sterility, stability, rate of dissolution or release, adsorption or penetration of the composition. In such embodiments, suitable formulation materials include, but are not limited to, amino acids (such as glycine, glutamine, asparagine, arginine or lysine); antimicrobials; antioxidants (such as ascorbic acid, sodium sulfite or sodium hydrogen-sulfite); buffers (such as borate, bicarbonate, Tris-HCl, citrates, phosphates or other organic acids); bulking agents (such as mannitol or glycine); chelating agents (such as ethylenediamine tetraacetic acid (EDTA)); complexing agents (such as caffeine, polyvinylpyrrolidone, beta-cyclodextrin or hydroxypropyl-beta-cyclodextrin); fillers; monosaccharides; disaccharides; and other carbohydrates (such as glucose, mannose or dextrins); proteins (such as serum albumin, gelatin or immunoglobulins); coloring, flavoring and diluting agents; emulsifying agents; hydrophilic polymers (such as polyvinylpyrrolidone); low molecular weight polypeptides; salt-forming counterions (such as sodium); preservatives (such as benzalkonium chloride, benzoic acid, salicylic acid, thimerosal, phenethyl alcohol, methylparaben, propylparaben, chlorhexidine, sorbic acid or hydrogen peroxide); solvents (such as glycerin, propylene glycol or polyethylene glycol); sugar alcohols (such as mannitol or sorbitol); suspending agents; surfactants or wetting agents (such as pluronics, PEG, sorbitan esters, polysorbates such as polysorbate 20, polysorbate, triton, tromethamine, lecithin, cholesterol, tyloxapal); stability enhancing agents (such as sucrose or sorbitol); tonicity enhancing agents (such as alkali metal halides, preferably sodium or potassium chloride, mannitol sorbitol); delivery vehicles; diluents; excipients and/or pharmaceutical adjuvants (see, Remington's Pharmaceutical Sciences, 18th ed. (Mack Publishing Company, 1990).

[0223] In certain embodiments, a pharmaceutical composition may contain nanoparticles, e.g., polymeric nanoparticles, liposomes, or micelles (See Anselmo et al. (2016) BIOENG. TRANSL. MED. 1: 10-29).

[0224] In certain embodiments, a pharmaceutical composition may contain a sustained- or controlled-delivery formulation. Techniques for formulating sustained- or controlled-delivery means, such as liposome carriers, bio-erodible microparticles or porous beads and depot injections, are also known to those skilled in the art. Sustained-release preparations may include, e.g., porous polymeric microparticles or semipermeable polymer matrices in the form of shaped articles, e.g., films, or microcapsules. Sustained release matrices may include polyesters, hydrogels, polylactides, copolymers of L-glutamic acid and gamma ethyl-L-glutamate, poly (2-hydroxyethyl-inethacrylate), ethylene vinyl acetate, or poly-D(-)-3-hydroxybutyric acid. Sustained release compositions may also include liposomes that can be prepared by any of several methods known in the art.

[0225] Pharmaceutical compositions containing a sialidase fusion protein or an antibody conjugate disclosed herein can be presented in a dosage unit form and can be prepared by any suitable method. A pharmaceutical composition should be formulated to be compatible with its intended route of administration. Examples of routes of administration are intravenous (IV), intradermal, inhalation, transdermal, topical, transmucosal, intrathecal and rectal administration. In certain embodiments, a sialidase fusion protein or an antibody conjugate disclosed herein is administered by IV infusion. In certain embodiments, a sialidase fusion protein or an antibody conjugate disclosed herein is administered by intratumoral injection. Useful formulations can be prepared by methods known in the pharmaceutical art. For example, see Remington's Pharmaceutical Sciences, 18th ed. (Mack Publishing Company, 1990). Formulation components suitable for parenteral administration include a sterile diluent such as water for injection, saline solution, fixed oils, polyethylene glycols, glycerin, propylene glycol or other synthetic solvents; antibacterial agents such as benzyl alcohol or methyl parabens; antioxidants such as ascorbic acid or sodium bisulfite; chelating agents such as EDTA; buffers such as acetates, citrates or phosphates; and agents for the adjustment of tonicity such as sodium chloride or dextrose.

[0226] For intravenous administration, suitable carriers include physiological saline, bacteriostatic water, Cremophor EL™ (BASF, Parsippany, NJ) or phosphate buffered saline (PBS). The carrier should be stable under the conditions of manufacture and storage, and should be preserved against microorganisms. The carrier can be a solvent or dispersion medium containing, for example, water, ethanol, polyol (for example, glycerol, propylene glycol, and liquid polyethylene glycol), and suitable mixtures thereof.

[0227] In certain embodiments, a pharmaceutical composition may contain a stabilizing agent. In certain embodiments, the stabilizing agent is a cation, such as a divalent cation. In certain embodiments, the cation is calcium or magnesium. The cation can be in the form of a salt, such as calcium chloride (CaCl₂)) or magnesium chloride (MgCl₂).

[0228] In certain embodiments, the stabilizing agent is present in an amount from about 0.05 mM to about 5 mM. For example, the stabilizing agent may be present in an amount of from about 0.05 mM to about 4 mM, from about 0.05 mM to about 3 mM, from about 0.05 mM to about 2 mM, from about 0.05 mM to about 1 mM, from about 0.05 mM to about 0.5 mM, from about 0.5 mM to about 4 mM, from about 0.5 mM to about 3 mM, from about 0.5 mM to about 2 mM, from about 0.5 mM to about 1 mM, from about 1 mM to about 4 mM, from about 1 mM to about 3 mM, of from about 1 mM to about 2 mM.

[0229] Pharmaceutical formulations preferably are sterile. Sterilization can be accomplished by any suitable method, e.g., filtration through sterile filtration membranes. Where the composition is lyophilized, filter sterilization can be conducted prior to or following lyophilization and reconstitution.

[0230] The compositions described herein may be administered locally or systemically. Administration will generally be parenteral administration. In a preferred embodiment, the pharmaceutical composition is administered subcutaneously and in an even more preferred embodiment intravenously. Preparations for parenteral administration include sterile aqueous or non-aqueous solutions, suspensions, and emulsions.

[0231] Generally, a therapeutically effective amount of active component, for example, a fusion protein and/or antibody conjugate, is in the range of 0.1 mg/kg to 100 mg/kg, e.g., 1 mg/kg to 100 mg/kg, 1 mg/kg to 10 mg/kg. The amount administered will depend on variables such as the type and extent of disease or indication to be treated, the overall health of the patient, the in vivo potency of the antibody, the pharmaceutical formulation, and the route of administration. The initial dosage can be increased beyond the upper level in order to rapidly achieve the desired blood-level or tissue-level. Alternatively, the initial dosage can be smaller than the optimum, and the daily dosage may be progressively increased during the course of treatment. Human dosage can be optimized, e.g., in a conventional Phase I dose escalation study designed to run from 0.5 mg/kg to 20 mg/kg. Dosing frequency can vary, depending on factors such as route of administration, dosage amount, serum half-life of the fusion protein and/or antibody conjugate, and the disease being treated. Exemplary dosing frequencies are once per day, once per week and once every two weeks. A preferred route of administration is parenteral, e.g., intravenous infusion. In certain embodiments, a fusion protein and/or antibody conjugate is lyophilized, and then reconstituted in buffered saline, at the time of administration.

### IV. Therapeutic Uses

[0232] The compositions and methods disclosed herein can be used to treat various forms of cancer in a subject or inhibit cancer growth in a subject. The invention provides a method of treating a cancer in a subject. The method comprises administering to the subject an effective amount of a sialidase anti-HER2 fusion protein and/or antibody conjugate, e.g., a fusion protein or antibody conjugate disclosed herein, either alone or in a combination with another therapeutic agent to treat the cancer in the subject. The term “effective amount” as used herein refers to the amount of an active agent (e.g., fusion protein according to the present invention) sufficient to effect beneficial or desired results. An effective amount can be administered in one or more administrations, applications or dosages and is not intended to be limited to a particular formulation or administration route.

[0233] As used herein, “treat”, “treating” and “treatment” mean the treatment of a disease in a subject, e.g., in a human. This includes: (a) inhibiting the disease, i.e., arresting its development; and (b) relieving the disease, i.e., causing regression of the disease state. As used herein, the terms “subject” and “patient” refer to an organism to be treated by the methods and compositions described herein. Such organisms preferably include, but are not limited to, mammals (e.g., murines, simians, equines, bovines, porcines, canines, felines, and the like), and more preferably includes humans.

[0234] Examples of cancers include solid tumors, soft tissue tumors, hematopoietic tumors and metastatic lesions. Examples of hematopoietic tumors include, leukemia, acute leukemia, acute lymphoblastic leukemia (ALL), B-cell, T-cell or FAB ALL, acute myeloid leukemia (AML), chronic myelocytic leukemia (CML), chronic lymphocytic leukemia (CLL), e.g., transformed CLL, diffuse large B-cell lymphomas (DLBCL), follicular lymphoma, hairy cell leukemia, myelodyplastic syndrome (MDS), a lymphoma, Hodgkin's disease, a malignant lymphoma, non-Hodgkin's lymphoma, Burkitt's lymphoma, multiple myeloma, or Richter's Syndrome (Richter's Transformation). Examples of solid tumors include malignancies, e.g., sarcomas, adenocarcinomas, and carcinomas, of the various organ systems, such as those affecting head and neck (including pharynx), thyroid, lung (small cell or non-small cell lung carcinoma (NSCLC)), breast, lymphoid, gastrointestinal (e.g., oral, esophageal, stomach, liver, pancreas, small intestine, colon and rectum, anal canal), genitals and genitourinary tract (e.g., renal, urothelial, bladder, ovarian, uterine, cervical, endometrial, prostate, testicular), CNS (e.g., neural or glial cells, e.g., neuroblastoma or glioma), or skin (e.g., melanoma).

[0235] In certain embodiments the cancer is an epithelial cancer, e.g., an epithelial cancer that upregulates the expression of sialylated glycans. Exemplary epithelial cancers include, but are not limited to, endometrial cancer, colon cancer, ovarian cancer, cervical cancer, vulvar cancer, uterine cancer or fallopian tube cancer, breast cancer, prostate cancer, lung cancer, pancreatic cancer, urinary cancer, bladder cancer, head and neck cancer, oral cancer and liver cancer. Epithelial cancers also include carcinomas, for example, acinar carcinoma, acinous carcinoma, adenocystic carcinoma, adenoid cystic carcinoma, carcinoma adenomatosum, carcinoma of adrenal cortex, alveolar carcinoma, alveolar cell carcinoma, basal cell carcinoma, carcinoma basocellulare, basaloid carcinoma, baso squamous cell carcinoma, bronchioalveolar carcinoma, bronchiolar carcinoma, bronchogenic carcinoma, cerebriform carcinoma, cholangiocellular carcinoma, chorionic carcinoma, colloid carcinoma, comedo carcinoma, corpus carcinoma, cribriform carcinoma, carcinoma en cuirasse, carcinoma cutaneum, cylindrical carcinoma, cylindrical cell carcinoma, duct carcinoma, carcinoma durum, embryonal carcinoma, encephaloid carcinoma, epiermoid carcinoma, carcinoma epitheliale adenoides, exophytic carcinoma, carcinoma ex ulcere, carcinoma fibrosum, gelatinifori carcinoma, gelatinous carcinoma, giant cell carcinoma, carcinoma gigantocellulare, glandular carcinoma, granulosa cell carcinoma, hair-matrix carcinoma, hematoid carcinoma, hepatocellular carcinoma, Hurthle cell carcinoma, hyaline carcinoma, hypemephroid carcinoma, infantile embryonal carcinoma, carcinoma in situ, intraepidermal carcinoma, intraepithelial carcinoma, Krompecher's carcinoma, Kulchitzky-cell carcinoma, large-cell carcinoma, lenticular carcinoma, carcinoma lenticulare, lipomatous carcinoma, lymphoepithelial carcinoma, carcinoma medullare, medullary carcinoma, melanotic carcinoma, carcinoma molle, mucinous carcinoma, carcinoma muciparum, carcinoma mucocellulare, mucoepidermoid carcinoma, carcinoma mucosum, mucous carcinoma, carcinoma myxomatodes, nasopharyngeal carcinoma, oat cell carcinoma, carcinoma ossificans, osteoid carcinoma, papillary carcinoma, periportal carcinoma, preinvasive carcinoma, prickle cell carcinoma, pultaceous carcinoma, renal cell carcinoma of kidney, reserve cell carcinoma, carcinoma sarcomatodes, schneiderian carcinoma, scirrhous carcinoma, carcinoma scroti, signet-ring cell carcinoma, carcinoma simplex, small-cell carcinoma, solanoid carcinoma, spheroidal cell carcinoma, spindle cell carcinoma, carcinoma spongiosum, squamous carcinoma, squamous cell carcinoma, string carcinoma, carcinoma telangiectaticum, carcinoma telangiectodes, transitional cell carcinoma, carcinoma tuberosum, tuberous carcinoma, verrucous carcinoma, and carcinoma villosum.

[0236] In certain embodiments the cancer is selected from lung bronchioloalveolar carcinoma (BAC), bladder cancer, a female genital tract malignancy (e.g., uterine serous carcinoma, endometrial carcinoma, vulvar squamous cell carcinoma, and uterine sarcoma), an ovarian surface epithelial carcinoma (e.g., clear cell carcinoma of the ovary, epithelial ovarian cancer, fallopian tube cancer, and primary peritoneal cancer), breast carcinoma, non-small cell lung cancer (NSCLC), a male genital tract malignancy (e.g., testicular cancer), retroperitoneal or peritoneal carcinoma, gastroesophageal adenocarcinoma, esophagogastric junction carcinoma, liver hepatocellular carcinoma, esophageal and esophagogastric junction carcinoma, cervical cancer, cholangiocarcinoma, pancreatic adenocarcinoma, extrahepatic bile duct adenocarcinoma, a small intestinal malignancy, gastric adenocarcinoma, cancer of unknown primary (CUP), colorectal adenocarcinoma, esophageal carcinoma, prostatic adenocarcinoma, kidney cancer, head and neck squamous carcinoma, thymic carcinoma, non-melanoma skin cancer, thyroid carcinoma (e.g., papillary carcinoma), a head and neck cancer, anal carcinoma, non-epithelial ovarian cancer (non-EOC), uveal melanoma, malignant pleural mesothelioma, small cell lung cancer (SCLC), a central nervous system cancer, a neuroendocrine tumor, and a soft tissue tumor.

[0237] In certain embodiments, the cancer is melanoma, non-small cell lung cancer, colon cancer, breast cancer, bladder cancer, or kidney cancer.

[0238] In certain embodiments, the cancer is an adenocarcinoma. In certain embodiments, the cancer is a metastatic cancer. In certain embodiments, the cancer is a refractory cancer.

[0239] In certain embodiments, the cancer is resistant to or non-responsive to treatment with an antibody, e.g., an antibody with ADCC activity, e.g., trastuzumab.

[0240] The methods and compositions described herein can be used alone or in combination with other therapeutic agents and/or modalities. The term administered “in combination,” as used herein, is understood to mean that two (or more) different treatments are delivered to the subject during the course of the subject's affliction with the disorder, such that the effects of the treatments on the patient overlap at a point in time. In certain embodiments, the delivery of one treatment is still occurring when the delivery of the second begins, so that there is overlap in terms of administration. This is sometimes referred to herein as “simultaneous” or “concurrent delivery.” In other embodiments, the delivery of one treatment ends before the delivery of the other treatment begins. In certain embodiments of either case, the treatment is more effective because of combined administration. For example, the second treatment is more effective, e.g., an equivalent effect is seen with less of the second treatment, or the second treatment reduces symptoms to a greater extent, than would be seen if the second treatment were administered in the absence of the first treatment, or the analogous situation is seen with the first treatment. In certain embodiments, delivery is such that the reduction in a symptom, or other parameter related to the disorder is greater than what would be observed with one treatment delivered in the absence of the other. The effect of the two treatments can be partially additive, wholly additive, or greater than additive. The delivery can be such that an effect of the first treatment delivered is still detectable when the second is delivered.

[0241] In certain embodiments, a method or composition described herein, is administered in combination with one or more additional therapies, e.g., surgery, radiation therapy, or administration of another therapeutic preparation. In certain embodiments, the additional therapy may include chemotherapy, e.g., a cytotoxic agent. In certain embodiments the additional therapy may include a targeted therapy, e.g., a tyrosine kinase inhibitor, a proteasome inhibitor, or a protease inhibitor. In certain embodiments, the additional therapy may include an anti-inflammatory, anti-angiogenic, anti-fibrotic, or anti-proliferative compound, e.g., a steroid, a biologic immunomodulator, a monoclonal antibody, an antibody fragment, an aptamer, an siRNA, an antisense molecule, a fusion protein, a cytokine, a cytokine receptor, a bronchodialator, a statin, an anti-inflammatory agent (e.g., methotrexate), or an NSAID. In certain embodiments, the additional therapy may include a combination of therapeutics of different classes.

[0242] In certain embodiments, a method or composition described herein is administered in combination with a checkpoint inhibitor. The checkpoint inhibitor may, for example, be selected from a PD-1 antagonist, PD-L1 antagonist, CTLA-4 antagonist, adenosine A2A receptor antagonist, B7-H3 antagonist, B7-H4 antagonist, BTLA antagonist, KIR antagonist, LAG3 antagonist, TIM-3 antagonist, VISTA antagonist, and TIGIT antagonist.

[0243] In certain embodiments, the checkpoint inhibitor is a PD-1 or PD-L1 inhibitor. PD-1 is a receptor present on the surface of T-cells that serves as an immune system checkpoint that inhibits or otherwise modulates T-cell activity at the appropriate time to prevent an overactive immune response. Cancer cells, however, can take advantage of this checkpoint by expressing ligands, for example, PD-L1, that interact with PD-1 on the surface of T-cells to shut down or modulate T-cell activity. Exemplary PD-1/PD-L1 based immune checkpoint inhibitors include antibody based therapeutics. Exemplary treatment methods that employ PD-1/PD-L1 based immune checkpoint inhibition are described in U.S. Pat. Nos. 8,728,474 and 9,073,994, and EP Patent No. 1537878B1, and, for example, include the use of anti-PD-1 antibodies. Exemplary anti-PD-1 antibodies are described, for example, in U.S. Pat. Nos. 8,952,136, 8,779,105, 8,008,449, 8,741,295, 9,205,148, 9,181,342, 9,102,728, 9,102,727, 8,952,136, 8,927,697, 8,900,587, 8,735,553, and 7,488,802. Exemplary anti-PD-1 antibodies include, for example, nivolumab (Opdivo®, Bristol-Myers Squibb Co.), pembrolizumab (Keytruda®, Merck Sharp & Dohme Corp.), PDR001 (Novartis Pharmaceuticals), and pidilizumab (CT-011, Cure Tech). Exemplary anti-PD-L1 antibodies are described, for example, in U.S. Pat. Nos. 9,273,135, 7,943,743, 9,175,082, 8,741,295, 8,552,154, and 8,217,149. Exemplary anti-PD-L1 antibodies include, for example, atezolizumab (Tecentriq®, Genentech), durvalumab (AstraZeneca), MEDI4736, avelumab, and BMS 936559 (Bristol Myers Squibb Co.).

[0244] In certain embodiments, a method or composition described herein is administered in combination with a CTLA-4 inhibitor. In the CTLA-4 pathway, the interaction of CTLA-4 on a T-cell with its ligands (e.g., CD80, also known as B7-1, and CD86) on the surface of an antigen presenting cells (rather than cancer cells) leads to T-cell inhibition. Exemplary CTLA-4 based immune checkpoint inhibition methods are described in U.S. Pat. Nos. 5,811,097, 5,855,887, 6,051,227. Exemplary anti-CTLA-4 antibodies are described in U.S. Pat. Nos. 6,984,720, 6,682,736, 7,311,910; 7,307,064, 7,109,003, 7,132,281, 6,207,156, 7,807,797, 7,824,679, 8,143,379, 8,263,073, 8,318,916, 8,017,114, 8,784,815, and 8,883,984, International (PCT) Publication Nos. WO98/42752, WO00/37504, and WO01/14424, and European Patent No. EP 1212422 B1. Exemplary CTLA-4 antibodies include ipilimumab or tremelimumab.

[0245] In certain embodiments, a method or composition described herein is administered in combination with (i) a PD-1 or PD-L1 inhibitor, e.g., a PD-1 or PD-L1 inhibitor disclosed herein, and (ii) CTLA-4 inhibitor, e.g., a CTLA-4 inhibitor disclosed herein.

[0246] In certain embodiments, a method or composition described herein is administered in combination with an IDO inhibitor. Exemplary IDO inhibitors include 1-methyl-D-tryptophan (known as indoximod), epacadostat (INCB24360), navoximod (GDC-0919), and BMS-986205.

[0247] Exemplary cytotoxic agents that can be administered in combination with a method or composition described herein include, for example, antimicrotubule agents, topoisomerase inhibitors, antimetabolites, protein synthesis and degradation inhibitors, mitotic inhibitors, alkylating agents, platinating agents, inhibitors of nucleic acid synthesis, histone deacetylase inhibitors (HDAC inhibitors, e.g., vorinostat (SAHA, MK0683), entinostat (MS-275), panobinostat (LBH589), trichostatin A (TSA), mocetinostat (MGCD0103), belinostat (PXD101), romidepsin (FK228, depsipeptide)), DNA methyltransferase inhibitors, nitrogen mustards, nitrosoureas, ethylenimines, alkyl sulfonates, triazenes, folate analogs, nucleoside analogs, ribonucleotide reductase inhibitors, vinca alkaloids, taxanes, epothilones, intercalating agents, agents capable of interfering with a signal transduction pathway, agents that promote apoptosis and radiation, or antibody molecule conjugates that bind surface proteins to deliver a toxic agent. In one embodiment, the cytotoxic agent that can be administered with a method or composition described herein is a platinum-based agent (such as cisplatin), cyclophosphamide, dacarbazine, methotrexate, fluorouracil, gemcitabine, capecitabine, hydroxyurea, topotecan, irinotecan, azacytidine, vorinostat, ixabepilone, bortezomib, taxanes (e.g., paclitaxel or docetaxel), cytochalasin B, gramicidin D, ethidium bromide, emetine, mitomycin, etoposide, tenoposide, vincristine, vinblastine, vinorelbine, colchicin, anthracyclines (e.g., doxorubicin or epirubicin) daunorubicin, dihydroxy anthracin dione, mitoxantrone, mithramycin, actinomycin D, adriamycin, 1-dehydrotestosterone, glucocorticoids, procaine, tetracaine, lidocaine, propranolol, puromycin, ricin, or maytansinoids.

[0248] The invention also provides a method of increasing the expression of HLA-DR, CD86, CD83, IFNγ, IL-1b, IL-6, TNFα, IL-17A, IL-2, or IL-6 in a cell, tissue, or subject. The method comprises contacting the cell, tissue, or subject with an effective amount of a fusion protein and/or antibody conjugate, e.g., a fusion protein or antibody conjugate disclosed herein. In certain embodiments, the cell is selected from a dendritic cell and a peripheral blood mononuclear cell (PBMC).

[0249] In certain embodiments, expression of HLA-DR, CD86, CD83, IFNγ, IL-1b, IL-6, TNFα, IL-17A, IL-2, or IL-6 in the cell, tissue, or subject is increased by at least about 10%, at least about 20%, at least about 50%, at least about 75%, at least about 100%, at least about 150%, at least about 200%, at least about 250%, at least about 300%, at least about 400%, at least about 500%, at least about 600%, at least about 700%, at least about 800%, at least about 900%, or at least about 1,000%, relative to a similar or otherwise identical cell or tissue that has not been contacted with the fusion protein or antibody conjugate. Gene expression may be measured by any suitable method known in the art, for example, by ELISA, or by Luminex multiplex assays.

[0250] The invention also provides a method of promoting infiltration of immune cells into a tumor in a subject in need thereof. The method comprises administering to the subject an effective amount of a fusion protein and/or antibody conjugate, e.g., a fusion protein or antibody conjugate disclosed herein. In certain embodiments, the immune cells are T-cells, e.g., CD4+ and/or CD8+ T-cells, e.g., CD69⁺CD8⁺ and/or GzmB⁺CD8⁺ T-cells. In certain embodiments, the immune cells are natural killer (NK) cells.

[0251] In certain embodiments, the infiltration of immune cells into the tumor in the subject is increased by at least about 10%, at least about 20%, at least about 50%, at least about 75%, at least about 100%, at least about 150%, at least about 200%, at least about 250%, at least about 300%, at least about 400%, at least about 500%, at least about 600%, at least about 700%, at least about 800%, at least about 900%, or at least about 1,000%, relative to a similar or otherwise identical tumor and/or subject that has not been administered the fusion protein or antibody conjugate. Infiltration of immune cells into a tumor may be measured by any suitable method known in the art, for example, antibody staining.

[0252] The invention also provides a method of increasing the number of circulating natural killer (NK) cells in a subject in need thereof. The method comprises administering to the subject an effective amount of a fusion protein and/or antibody conjugate, e.g., a fusion protein or antibody conjugate disclosed herein, so as to increase the number of circulating NK cells relative to prior to administration of the fusion protein, antibody conjugate or pharmaceutical composition.

[0253] In certain embodiments, the number of circulating NK cells in the subject is increased by at least about 10%, at least about 20%, at least about 50%, at least about 75%, at least about 100%, at least about 150%, at least about 200%, at least about 250%, at least about 300%, at least about 400%, at least about 500%, at least about 600%, at least about 700%, at least about 800%, at least about 900%, or at least about 1,000%, relative to a similar or otherwise identical subject that has not been administered the fusion protein or antibody conjugate. Circulating NK cells in a subject may be measured by any suitable method known in the art, for example, antibody staining.

[0254] The invention also provides a method of increasing the number of T-cells in the draining lymph node in a subject in need thereof. The method comprises administering to the subject an effective amount of a fusion protein, antibody conjugate, and/or pharmaceutical composition, e.g., a fusion protein, antibody conjugate, and/or pharmaceutical composition disclosed herein, so as to increase the number of T-cells in the draining lymph node relative to prior to administration of the fusion protein, antibody conjugate or pharmaceutical composition. In certain embodiments, the immune cells are T-cells, e.g., CD4+ and/or CD8+ T-cells.

[0255] In certain embodiments, the number of T-cells in the draining lymph node in the subject is increased by at least about 10%, at least about 20%, at least about 50%, at least about 75%, at least about 100%, at least about 150%, at least about 200%, at least about 250%, at least about 300%, at least about 400%, at least about 500%, at least about 600%, at least about 700%, at least about 800%, at least about 900%, or at least about 1,000%, relative to a similar or otherwise identical subject that has not been administered the fusion protein, antibody conjugate, or pharmaceutical composition. T-cells in the draining lymph node in a subject may be measured by any suitable method known in the art, for example, antibody staining.

[0256] The invention also provides a method of increasing expression of Cd3, Cd4, Cd8, Cd274, Ctla4, Icos, Pdcd1, Lag3, Il6, Il1b, 112, Ifng, Ifna1, Mx1, Gzmb, Cxcl9, Cxcl12, and/or Ccl5 in a cell, tissue, or subject. The method comprises contacting the cell, tissue, or subject with an effective amount of a fusion protein, antibody conjugate, and/or pharmaceutical composition, e.g., a fusion protein, antibody conjugate, and/or pharmaceutical composition disclosed herein, so as to increase the expression of Cd3, Cd4, Cd8, Cd274, Ctla4, Icos, Pdcd1, Lag3, Il6, Il1b, 112, Ifng, Ifna1, Mx1, Gzmb, Cxcl9, Cxcl12, and/or Ccl5 relative to the cell, tissue or subject prior to contact with the fusion protein, antibody conjugate or pharmaceutical composition.

[0257] In certain embodiments, expression of Cd3, Cd4, Cd8, Cd274, Ctla4, Icos, Pdcd1, Lag3, Il6, Il1b, 112, Ifng, Ifna1, Mx1, Gzmb, Cxcl9, Cxcl12, and/or Ccl5 in the cell, tissue, or subject is increased by at least about 10%, at least about 20%, at least about 50%, at least about 75%, at least about 100%, at least about 150%, at least about 200%, at least about 250%, at least about 300%, at least about 400%, at least about 500%, at least about 600%, at least about 700%, at least about 800%, at least about 900%, or at least about 1,000%, relative to a similar or otherwise identical cell, tissue, or subject that has not been contacted with the fusion protein, antibody conjugate, or pharmaceutical composition. Gene expression may be measured by any suitable method known in the art, for example, by ELISA, Luminex multiplex assays, or Nanostring technology.

[0258] The invention also provides a method of removing sialic acid from a cell or tissue. The method comprises contacting the cell or tissue with an effective amount of a fusion protein and/or antibody conjugate, e.g., a fusion protein or antibody conjugate disclosed herein. The invention also provides a method of removing sialic acid from a cell in a subject, the method comprising administering to the subject an effective amount of a pharmaceutical composition comprising a fusion protein and/or antibody conjugate, e.g., a fusion protein or antibody conjugate disclosed herein, thereby to remove sialic acid from the cell.

[0259] In certain embodiments, the cell is tumor cell, dendritic cell (DC) or monocyte. In certain embodiments, the cell is a monocyte, and the method results in increased expression of an MHC-II molecule (e.g., HLA-DR) on the monocyte. In certain embodiments, expression of an MHC-II molecule in the cell or tissue is increased by at least about 10%, at least about 20%, at least about 50%, at least about 75%, at least about 100%, at least about 150%, at least about 200%, at least about 250%, at least about 300%, at least about 400%, at least about 500%, at least about 600%, at least about 700%, at least about 800%, at least about 900%, or at least about 1,000%, relative to a similar or otherwise identical cell or tissue that has not been contacted with the fusion protein and/or antibody conjugate. Gene expression may be measured by any suitable method known in the art, for example, by ELISA, by Luminex multiplex assays, or by flow cytometry.

[0260] The invention also provides a method of enhancing phagocytosis of a tumor cell. The method comprises contacting the tumor cell with a fusion protein and/or antibody conjugate, e.g., a fusion protein or antibody conjugate disclosed herein, in an amount effective to remove sialic acid from the tumor cell, thereby enhancing phagocytosis of the tumor cell. In certain embodiments, the disclosure relates to a method of increasing phagocytosis of a tumor cell in a subject, the method comprising administering to the subject an effective amount of a pharmaceutical composition comprising a fusion protein and/or antibody conjugate, e.g., a fusion protein or antibody conjugate disclosed herein, in an amount effective to remove sialic acid from the tumor cell, thereby to increase phagocytosis of the tumor cell.

[0261] In certain embodiments, phagocytosis is increased by at least about 10%, at least about 20%, at least about 50%, at least about 75%, at least about 100%, at least about 150%, at least about 200%, at least about 250%, at least about 300%, at least about 400%, at least about 500%, at least about 600%, at least about 700%, at least about 800%, at least about 900%, or at least about 1,000%, relative to a similar or otherwise identical tumor cell or population of tumor cells that has not or have not been contacted with the fusion protein and/or antibody conjugate. Phagocytosis may be measured by any suitable method known in the art.

[0262] The invention also provides a method of activating a dendritic cell (DC). The method comprises contacting the DC with a tumor cell that has been treated with a fusion protein and/or antibody conjugate, e.g., a fusion protein or antibody conjugate disclosed herein. In certain embodiments, the disclosure relates to a method of activating a dendritic cell (DC) or a population of DCs in a subject, the method comprising administering to the subject an amount of a pharmaceutical composition comprising a fusion protein and/or antibody conjugate, e.g., a fusion protein or antibody conjugate disclosed herein, effective to remove sialic acid from a tumor cell in the subject, thereby to activate the DC or the population of DCs in the subject.

[0263] In certain embodiments, activation of the DC or a population of DCs is increased by at least about 10%, at least about 20%, at least about 50%, at least about 75%, at least about 100%, at least about 150%, at least about 200%, at least about 250%, at least about 300%, at least about 400%, at least about 500%, at least about 600%, at least about 700%, at least about 800%, at least about 900%, or at least about 1,000%, relative to a similar or otherwise identical DC or population of DCs that has not or have not been contacted with a tumor cell that has been treated with the fusion protein and/or antibody conjugate. Activation may be measured by any suitable method known in the art.

[0264] The invention also provides a method of reducing Siglec-15 binding activity, thereby to increase anti-tumor activity in a tumor microenvironment, the method comprising contacting a T cell with a fusion protein and/or antibody conjugate, e.g., a fusion protein or antibody conjugate disclosed herein. In certain embodiments, the disclosure relates to a method of reducing Siglec-15 binding activity, thereby to increase anti-tumor activity in a tumor microenvironment of a patient, the method comprising administering to the subject an effective amount of a pharmaceutical composition comprising a fusion protein and/or antibody conjugate, e.g., a fusion protein or antibody conjugate disclosed herein, thereby to increase anti-tumor activity (e.g., T cell activity) in the subject.

[0265] In certain embodiments, Siglec-15 binding activity is reduced by at least about 10%, at least about 20%, at least about 50%, at least about 75%, or about 100%, relative to Siglec-15 that has not or have not been contacted with the fusion protein and/or antibody conjugate. Binding may be measured by any suitable method known in the art.

[0266] Throughout the description, where compositions are described as having, including, or comprising specific components, or where processes and methods are described as having, including, or comprising specific steps, it is contemplated that, additionally, there are compositions of the present invention that consist essentially of, or consist of, the recited components, and that there are processes and methods according to the present invention that consist essentially of, or consist of, the recited processing steps.

[0267] In the application, where an element or component is said to be included in and/or selected from a list of recited elements or components, it should be understood that the element or component can be any one of the recited elements or components, or the element or component can be selected from a group consisting of two or more of the recited elements or components.

[0268] Further, it should be understood that elements and/or features of a composition or a method described herein can be combined in a variety of ways without departing from the spirit and scope of the present invention, whether explicit or implicit herein. For example, where reference is made to a particular compound, that compound can be used in various embodiments of compositions of the present invention and/or in methods of the present invention, unless otherwise understood from the context. In other words, within this application, embodiments have been described and depicted in a way that enables a clear and concise application to be written and drawn, but it is intended and will be appreciated that embodiments may be variously combined or separated without parting from the present teachings and invention(s). For example, it will be appreciated that all features described and depicted herein can be applicable to all aspects of the invention(s) described and depicted herein.

[0269] It should be understood that the expression “at least one of” includes individually each of the recited objects after the expression and the various combinations of two or more of the recited objects unless otherwise understood from the context and use. The expression “and/or” in connection with three or more recited objects should be understood to have the same meaning unless otherwise understood from the context.

[0270] The use of the term “include,” “includes,” “including,” “have,” “has,” “having,” “contain,” “contains,” or “containing,” including grammatical equivalents thereof, should be understood generally as open-ended and non-limiting, for example, not excluding additional unrecited elements or steps, unless otherwise specifically stated or understood from the context.

[0271] Where the use of the term “about” is before a quantitative value, the present invention also includes the specific quantitative value itself, unless specifically stated otherwise. As used herein, the term “about” refers to a +10% variation from the nominal value unless otherwise indicated or inferred.

[0272] It should be understood that the order of steps or order for performing certain actions is immaterial so long as the present invention remain operable. Moreover, two or more steps or actions may be conducted simultaneously.

[0273] The use of any and all examples, or exemplary language herein, for example, “such as” or “including,” is intended merely to illustrate better the present invention and does not pose a limitation on the scope of the invention unless claimed. No language in the specification should be construed as indicating any non-claimed element as essential to the practice of the present invention.

### EXAMPLES

[0274] The following Examples are merely illustrative and are not intended to limit the scope or content of the invention in any way.

### Example 1

[0275] This Example describes the construction of recombinant human sialidases with mutations that increase expression and/or activity of the sialidase.

[0276] Mutant Neu2 sialidases were constructed including rationally designed substitutions at position A42. A structural analysis of homologous sialidases revealed that transferring the G147R neuraminidase (sialidase) mutation from influenza A(H1N1)pdm09 onto human Neu2 may have stabilizing effects.

[0277] Neu2-M259-Fc (with amino acid sequence SEQ ID NO: 210, encoded by nucleotide sequence SEQ ID NO: 217, and including mutations MID, V6Y, A42R, P62G, A93E, Q126Y, I187K, A242F, Q270T, and C332A) was expressed in a 1 L transfection of Expi293 human cells using the pCEP4 mammalian expression vector. Neu2-M259-Fc was purified using protein A followed by cation exchange and ceramic hydroxyapatite (CHT) chromatography, quantified with a UV-Vis spectrophotometer (NanoDrop), and examined by SDS-PAGE.

[0278] Additional mutant Neu2 sialidases made and tested in this Example include Neu2-M260-Fc (with amino acid sequence SEQ ID NO: 220, encoded by nucleotide sequence SEQ ID NO: 221, and including mutations MID, V6Y, P62G, A93E, Q112E, Q126Y, I187K, Q270T, A242F, and C332A), Neu2-M261-Fc (with amino acid sequence SEQ ID NO: 222, encoded by nucleotide sequence SEQ ID NO: 223, and including mutations MID, V6Y, P62G, A93E, Q126Y, I187K, E225C, Q270T, A290C, A242F, and C332A), Neu2-M106-Fc (with amino acid sequence SEQ ID NO: 48, encoded by nucleotide sequence SEQ ID NO: 89, and including mutations MID, V6Y, P62G, A93E, I187K, and C332A), and Neu2-173-Fc (with amino acid sequence SEQ ID NO: 159, encoded by nucleotide sequence SEQ ID NO: 181, and including mutations MID, V6Y, P62G, A93E, Q126Y, I187K, A242F, Q270T, and C332A).

[0279] FIG. 4A is an image of an SDS-PAGE gel showing Neu2-M259-Fc under non-reducing and reducing conditions. FIG. 4B is an SEC-HPLC trace for Neu2-M259-Fc, where the monomer species had a retention time of 21.7 minutes, and a monomer content of 96%.

[0280] The enzyme kinetics of Neu2-M259-Fc, Neu2-M260-Fc, Neu2-M261-Fc, Neu2-M106-Fc, and Neu2-173-Fc were assayed by measuring the release of sialic acid from the fluorogenic substrate 4-methylumbelliferyl-N-acetylneuraminic acid (4MU-NeuAc). A Michaelis-Menton kinetics characterization (measured at a variable substrate concentration) of Neu2-M259-Fc, Neu2-M106-Fc, and Neu2-173-Fc is depicted in FIG. 5A. Estimated KM values were 0.27 mM (Neu2-M106-Fc), 0.46 mM (Neu2-M173-Fc), and 0.20 mM (Neu2-M259-Fc). Enzyme potency (measured at variable enzyme concentration) of Neu2-M259-Fc, Neu2-M106-Fc, and Neu2-173-Fc is depicted in FIG. 5B. Approximate EC₅₀ values were 20.7 pg/mL (Neu2-M106-Fc), 38.3 pg/mL (Neu2-M173-Fc), and 15.18 μg/mL (Neu2-M259-Fc).

[0281] The thermal stability of Neu2-M259-Fc, Neu2-M260-Fc, Neu2-M261-Fc, Neu2-M106-Fc, and Neu2-173-Fc were assayed. Samples were prepared at 0.2 mg/mL, and incubated for 15 minutes across a temperature gradient from 37° C. to 80° C. Enzyme activity was then measured by incubation of 2 μg of enzyme with 0.5 mM of 4-MU-Neu5Ac substrate. Tm was determined by fitting enzyme activity curves versus temperature curves. FIG. 6 depicts a thermal stability characterization of Neu2-M259-Fc, Neu2-M106-Fc, and Neu2-173-Fc.

[0282] A summary of certain biochemical attributes of Neu2-Fc variants M106-Fc, M173-Fc, M259-Fc, Neu2-M260-Fc, and Neu2-M261-Fc is depicted in TABLE 10. In TABLE 10, enzymatic activity is indicated as “+++,” which denotes activity >2 fold higher than wild-type Neu2, or “++,” which denotes activity comparable to wild-type Neu2. Together, these results show that Neu2-Fc variants M259-Fc and M260-Fc have improved expression yield and thermal stability relative to the M106-Fc and M173-Fc constructs, and M261-Fc has improved expression yield relative to the M106-Fc and M173-Fc constructs.

TABLE 10

| | | | | En- |
|---|---|---|---|---|
| | | Yield | Tm | zyme |
| | | (mg/ | (° | activ- |
| Name | Mutations | L) | C.) | ity |
| M106- | M1D, V6Y, P62G, A93E, I187K, C332A | 13 | 49.0 | +++ |
| Fc | | | | |
| M173- | M1D, V6Y, P62G, A93E, Q126Y, I187K, | 27.2 | 57.1 | ++ |
| Fc | Q270T, A242F, C332A | | | |
| M259- | M1D, V6Y, A42R, P62G, A93E, Q126Y, | 32 | 61.4 | +++ |
| Fc | I187K, Q270T, A242F, C332A | | | |
| M260- | M1D, V6Y, P62G, A93E, Q112E, | 34 | 58.7 | +++ |
| Fc | Q126Y, I187K, Q270T, A242F, C332A | | | |
| M261- | M1D, V6Y, P62G, A93E, Q126Y, I187K, | 66 | 55.7 | ++ |
| Fc | E225C, Q270T, A290C, A242F, C332A | | | |

[0283] The thermal stability of Neu2-M259-Fc, Neu2-M106-Fc, and Neu2-173-Fc was further assayed by incubating samples at 1 mg/mL at 37° C. for 4 hours, 24 hours, or 5 days. Enzyme activity was then measured using the 4-MU-Neu5Ac assay. Results are depicted in FIG. 7, and show increased thermal stability for Neu2-M259-Fc.

[0284] A systematic analysis of the ten mutations in Neu2 variant M-259-Fc was conducted to determine the contribution of each substitution. Each of the ten mutations in Neu2 variant M-259-Fc was backmutated to the corresponding residue in wildtype Neu2, resulting in ten variants (M262-Fc through M271-Fc) each having nine mutations. The resulting variants are described in TABLE 11.

TABLE 11

| | Backmutation | | | | AA | Nuc |
|---|---|---|---|---|---|---|
| | Relative to M259-Fc | | | | SEQ | SEQ |
| Name | AA # | Mut | WT | Total Mutations | ID NO | ID NO |
| M259-Fc | | — | — | M1D, V6Y, A42R, P62G, A93E, | 210 | 217 |
| | | | | Q126Y, I187K, Q270T, A242F, C332A | | |
| M262-Fc | 1 | D | M | ΔD, V6Y, A42R, P62G, A93E, Q126Y, | 224 | 225 |
| | | | | I187K, Q270T, A242F, C332A | | |
| M263-Fc | 6 | Y | V | M1D, A42R, P62G, A93E, Q126Y, | 226 | 227 |
| | | | | I187K, Q270T, A242F, C332A | | |
| M173-Fc | 42 | R | A | M1D, V6Y, P62G, A93E, Q126Y, | 228 | 229 |
| | | | | I187K, Q270T, A242F, C332A | | |
| M264-Fc | 62 | G | P | M1D, V6Y, A42R, A93E, Q126Y, | 230 | 231 |
| | | | | I187K, Q270T, A242F, C332A | | |
| M265-Fc | 93 | E | A | M1D, V6Y, A42R, P62G, Q126Y, | 232 | 233 |
| | | | | I187K, Q270T, A242F, C332A | | |
| M266-Fc | 126 | Y | Q | M1D, V6Y, A42R, P62G, A93E, | 234 | 235 |
| | | | | I187K, Q270T, A242F, C332A | | |
| M267-Fc | 187 | K | I | M1D, V6Y, A42R, P62G, A93E, | 236 | 237 |
| | | | | Q126Y, Q270T, A242F, C332A | | |
| M268-Fc | 242 | F | A | M1D, V6Y, A42R, P62G, A93E, | 238 | 239 |
| | | | | Q126Y, I187K, Q270T, C332A | | |
| M269-Fc | 270 | T | Q | M1D, V6Y, A42R, P62G, A93E, | 240 | 241 |
| | | | | Q126Y, I187K, A242F, C332A | | |
| M270-Fc | 332 | A | C | M1D, V6Y, A42R, P62G, A93E, | 242 | 243 |
| | | | | Q126Y, I187K, Q270T, A242F | | |

[0285] M259-Fc, M262-Fc through M270-Fc, and M173-Fc were expressed in Expi293 human cells using the pCEP4 mammalian expression vector, purified using a single step Protein-A purification, quantified with a UV-Vis spectrophotometer (NanoDrop), and examined by SEC-HPLC. Enzyme kinetics were assayed by measuring the release of sialic acid from the fluorogenic substrate 4-methylumbelliferyl-N-acetylneuraminic acid (4MU-NeuAc). Thermal stability was assayed by incubating samples across a temperature gradient from 37° C. to 80° C., followed by measurement of enzyme activity, as described above. Tm was determined by fitting enzyme activity curves versus temperature curves. Results are depicted in TABLE 12. In TABLE 12, enzymatic activity is indicated as “+++,” which denotes activity >2 fold higher than wild-type Neu2, “++,” which denotes activity comparable to wild-type Neu2, or “+,” which denotes activity lower than wild-type Neu2.

TABLE 12

| | SEC-HPLC | Yield | Tm | Enzyme |
|---|---|---|---|---|
| Name | Monomer % | (mg/L) | (° C.) | activity |
| M259-Fc | 84% | 37.8 | 60 | +++ |
| M262-Fc | 79% | 32.1 | 57.7 | + |
| M263-Fc | 88% | 17.1 | 62 | +++ |
| M173-Fc | 82% | 35.3 | 56 | + |
| M264-Fc | 92% | 22 | 62 | +++ |
| M265-Fc | 81% | 24.9 | 60 | +++ |
| M266-Fc | 90% | 9.6 | 64 | +++ |
| M267-Fc | 70% | 14 | 61 | +++ |
| M268-Fc | 76% | 38 | 57 | +++ |
| M269-Fc | 79% | 42.9 | 53 | ++ |
| M270-Fc | 87% | 30 | 59 | +++ |

[0286] Together, the results showed that removal of each of the individual mutations in M259-Fc negatively impacted at least one of monomer percentage, yield, thermal stability, or enzyme activity. In other words, each of the mutations were found to contribute to at least one of the monomer percentage, yield, stability and activity of the M259-Fc construct.

### Example 2

[0287] This Example describes the construction and expression of anti-HER2 antibody-sialidase genetic fusion proteins, and anti-HER2 antibody sialidase conjugates (ASCs) containing the fusion proteins, with mutated human sialidases.

[0288] The architecture for five types of exemplary ASCs is depicted in FIG. 3. The first type of ASC, referred to as “Raptor,” includes an antibody (with two heavy chains and two light chains) with a sialidase fused at the C-terminus of each heavy chain of the antibody (FIG. 3A). The second type of ASC, referred to as “Janus,” contains one antibody arm (with one heavy chain and one light chain), and one sialidase-Fc fusion with a sialidase fused at the N-terminus of one arm of the Fc. Each Fc domain polypeptide in the Janus ASC contains either the “knob” (T366Y) or “hole” (Y407T) mutation for heterodimerization (residue numbers according to EU numbering, Kabat, E. A., et al. (1991) supra) (FIG. 3B). The third type of ASC, referred to as “Lobster,” contains two Fc domain polypeptides each with a sialidase fused at the N-terminus of the Fc and a scFv fused at the C-terminus of the Fc (FIG. 3C). The fourth type of ASC, referred to as “Bunk,” contains one antibody arm (with one heavy chain and one light chain) with an scFv fused at the C-terminus of one arm of the Fc and one sialidase-Fc fusion with a sialidase fused at the N-terminus of the other arm of the Fc. Each Fc domain polypeptide in the Bunk ASC contains either the “knob” (T366Y) or “hole” (Y407T) mutation for heterodimerization (residue numbers according to EU numbering, Kabat, E. A., et al. (1991) supra) (FIG. 3D). The fifth type of ASC, referred to as “Lobster-Fab,” contains two Fc domain polypeptides each with a sialidase fused at the N-terminus of the Fc and a Fab fused at the C-terminus of the Fc (FIG. 3E).

[0289] A Janus Antibody Sialidase Conjugate (ASC) was made using Neu2 with MID, V6Y, A42R, P62G, A93E, Q126Y, I187K, A242F, Q270T, and C332 Å substitutions and trastuzumab. This ASC, referred to as “Janus Trastuzumab 2,” included a first polypeptide chain with amino acid sequence SEQ ID NO: 66, encoded by nucleotide sequence SEQ ID NO: 86, a second polypeptide chain with amino acid sequence SEQ ID NO: 189, encoded by nucleotide sequence SEQ ID NO: 245, and a third polypeptide chain with amino acid sequence SEQ ID NO: 205, encoded by nucleotide sequence SEQ ID NO: 246. Janus Trastuzumab 2 was expressed in a 1,000 mL transfection of Expi293 human cells using the pCEP4 mammalian expression vector. The ASC was purified using protein A, cation exchange and ceramic hydroxyapatite (CHT) chromatography, quantified with a UV-Vis spectrophotometer (NanoDrop), and examined by SDS-PAGE. Janus Trastuzumab 2 expressed well with 95% monomer purity as determined by SEC-HPLC (FIG. 8).

[0290] The enzymatic activity of the recombinantly expressed Janus Trastuzumab 2 was assayed by measuring the release of sialic acid from the fluorogenic substrate 4-methylumbelliferyl-N-acetylneuraminic acid (4MU-NeuAc), as described above. Janus Trastuzumab 2 was enzymatically active, with a Vmax of 2.2×108. Janus Trastuzumab 2 was tested for antigen (HER2) binding by using ForteBio Octet with the ASC captured on anti-Fc sensors with dipping into serial dilutions of HER2 (titrated from 100 nM in a 2× series dilution). The buffer reference was subtracted from the signal and aligned to the baseline. KD, Kon and Koff values were generated using 1:1 fitting model. Janus Trastuzumab 2 bound to HER2 with a KD of 5.5E−10, Kon of 1.24E06 (1/Ms), and a Koff of 6.91E−04 (1/s) as shown in FIG. 9.

[0291] An additional Janus Antibody Sialidase Conjugate (ASC) was made using Neu2 with MID, V6Y, A42R, P62G, A93E, Q126Y, I187K, E218A, A242F, Q270T, and C332 Å substitutions and trastuzumab. This ASC, which included an E218 Å mutation resulting in a loss of sialidase activity, was referred to as “Janus Trastuzumab LOF” or “Janus LOF,” and included a first polypeptide chain with amino acid sequence SEQ ID NO: 66, encoded by nucleotide sequence SEQ ID NO: 86, a second polypeptide chain with amino acid sequence SEQ ID NO: 189, encoded by nucleotide sequence SEQ ID NO: 245, and a third polypeptide chain with amino acid sequence SEQ ID NO: 250, encoded by nucleotide sequence SEQ ID NO: 251.

[0292] Janus LOF was expressed and purified generally as described above, yielding a protein of 89% monomeric purity at 100 mg/mL, and no measurable enzymatic activity.

### Example 3

[0293] This Example describes the in vivo administration of anti-HER2 antibody sialidase conjugates (ASCs) containing human sialidases. Janus Trastuzumab 2, as described above in Example 2, and including a first polypeptide chain with amino acid sequence SEQ ID NO: 66, encoded by nucleotide sequence SEQ ID NO: 86, a second polypeptide chain with amino acid sequence SEQ ID NO: 189, encoded by nucleotide sequence SEQ ID NO: 245, and a third polypeptide chain with amino acid sequence SEQ ID NO: 205, encoded by nucleotide sequence SEQ ID NO: 246, was made and tested in this Example. Janus Trastuzumab 2 was compared to isotype control antibody and trastuzumab in a mouse syngeneic tumor model injected with a murine breast cancer cell line stably expressing human HER2 (EMT6-HER2). Mice, 6-8 weeks of age, were inoculated subcutaneously in the right lower flank region with HER2-expressing cells for tumor development. Mice were randomly allocated to 5 groups of 8 animals each when tumors reached a mean ˜75-100 mm3 and treated as shown in TABLE 13.

TABLE 13

| Group | Treatment | Dose | | Route | Schedule |
|---|---|---|---|---|---|
| 1 | Isotype Control | 10 | mg/kg | IP | Twice per |
| 2 | Trastuzumab | 1 | mg/kg | | week; 6 doses |
| 3 | Trastuzumab | 10 | mg/kg | | |
| 4 | Janus Trastuzumab 2 | 1 | mg/kg | | |
| 5 | Janus Trastuzumab 2 | 10 | mg/kg | | |

[0294] Mice were treated with intraperitoneal injections of 10 mg/kg of trastuzumab, Janus Trastuzumab 2, or isotype control every other day, and tumor volume (mm3) was recorded. Complete Responses (CR) were defined as regression below the limit of palpitation at any point during the study and Partial Responses (PR) were defined as palpable tumors which were not.

[0295] Tumor volumes for individual mice are shown in FIGS. 10A-10E. As depicted, Janus Trastuzumab 2 exhibited increased anti-tumor activity based on CRs and PRs as compared to equivalent doses of trastuzumab. Mean tumor volumes are shown in FIG. 10F. Collectively, these results show that the Janus Trastuzumab 2 construct showed comparable or greater activity than trastuzumab.

### Example 4

[0296] This Example describes characterization of anti-HER2 antibody sialidase conjugates (ASCs).

[0297] Janus Trastuzumab 2, as described above in Example 2, and including a first polypeptide chain with amino acid sequence SEQ ID NO: 66, encoded by nucleotide sequence SEQ ID NO: 86, a second polypeptide chain with amino acid sequence SEQ ID NO: 189, encoded by nucleotide sequence SEQ ID NO: 245, and a third polypeptide chain with amino acid sequence SEQ ID NO: 205, encoded by nucleotide sequence SEQ ID NO: 246, and Janus LOF, as described above in Example 2, and including a first polypeptide chain with amino acid sequence SEQ ID NO: 66, encoded by nucleotide sequence SEQ ID NO: 86, a second polypeptide chain with amino acid sequence SEQ ID NO: 189, encoded by nucleotide sequence SEQ ID NO: 245, and a third polypeptide chain with amino acid sequence SEQ ID NO: 250, encoded by nucleotide sequence SEQ ID NO: 251, were made and tested in this Example.

[0298] The enzymatic activity of Janus Trastuzumab 2 was assayed by measuring the release of sialic acid from the fluorogenic substrate 4-methylumbelliferyl-N-acetylneuraminic acid (4MU-NeuAc), as described above. Results are shown in FIG. 11. Janus Trastuzumab 2 had a Vmax of 0.002354 mM/min, a Km of 1.464 mM, and a Kcat of 8260 per second.

[0299] The thermal stability of Janus Trastuzumab 2 was assayed by incubating samples including 2 μg of Janus Trastuzumab 2 and 0.5 mM substrate for 15 minutes across a temperature gradient from 37° C. to 80° C. Enzymatic activity was then measured, and Tm was determined by fitting enzyme activity curves versus temperature curves. Results are shown in FIG. 12. Janus Trastuzumab 2 had a thermal stability (Tm) of 58.7±0.2° C.

[0300] The ability of Janus Trastuzumab 2 to desialylate human tumor cells with either a low or high level of HER2 expression was also evaluated. Cells were incubated for 17 hours at 37° C. with varying concentrations of either Janus Trastuzumab 2 or enzymatically inactive Janus LOF. Cells were washed and then stained with Hydra9, a hexameric version of the extracellular domain of human Siglec 9 (as described in International (PCT) Application Publication No. WO2019/237070). Hydra9 binds to sialic acid-based glycostructures on the cell surface, and therefore a decrease in Hydra9 staining is indicative of desialylation. Cells were also stained with biotinylated peanut agglutinin (PNA, Vector Laboratories, B-1075-5). PNA binds to galactosyl structures exposed by removal of sialic acid, and therefore an increase in PNA staining is indicative of desialylation.

[0301] Results using SKBR-3 cells, a human cell line with high levels of HER2 expression, are shown in FIG. 13. FIG. 13A depicts Hydra9 staining following treatment with either Janus Trastuzumab 2 or Janus LOF. Janus Trastuzumab 2 demonstrated an IC50 of 0.0002992 μg/mL while Janus LOF demonstrated no appreciable activity. FIG. 13B depicts PNA staining following treatment with Janus Trastuzumab 2 or Janus LOF. Janus Trastuzumab 2 demonstrated a EC50 of 0.1298 μg/mL while Janus LOF demonstrated no appreciable activity.

[0302] Results using HT-29 cells, a human cell line with low but detectable levels of HER2 expression, are shown in FIG. 14. FIG. 14A depicts Hydra9 staining following treatment with either Janus Trastuzumab 2 or Janus LOF. Janus Trastuzumab 2 demonstrated an IC₅₀ of 0.1129 μg/mL while Janus LOF demonstrated no appreciable activity. FIG. 14B depicts PNA staining following treatment with Janus Trastuzumab 2 or Janus LOF. Janus Trastuzumab 2 demonstrated a EC₅₀ of 14.48 μg/ml while Janus LOF demonstrated no appreciable activity.

[0303] The IC₅₀ and EC₅₀ values for Janus Trastuzumab 2 for the higher HER2-expressing SKBR-3 cells were both lower than the corresponding IC₅₀ and EC₅₀ values for the lower HER2-expressing HT-29 cells, suggesting that HER2 antibody mediated cell binding increased cell surface desialylation efficiency.

### Example 5

[0304] This Example describes Antibody-Dependent Cellular Cytotoxicity (ADCC) and Antibody-Dependent Cellular Phagocytosis Assay (ADCP) assays using anti-HER2 antibody sialidase conjugates (ASCs).

[0305] For ADCC assays, natural killer cells (1024-5133JN21, Cellero/Hemacare) were cultured overnight in RPMI-1640 medium containing 10% heat-inactivated fetal bovine serum, antibiotics, and recombinant human interleukin-2 at a concentration of 10 ng/mL. On the day of the ADCC assay, NK cells were harvested, washed, and counted.

[0306] Target tumor cell lines were cultured in appropriate media supplemented with 10% heat-inactivated fetal bovine serum, antibiotics, non-essential amino acids, pyruvic acid and grown to logarithmic growth phase by passaging 2-3 times. Target tumor cells were prepared by washing with PBS, lifted from culture dishes by treating with Accutase, washed with PBS, spun down, and resuspended in appropriate media at a concentration of 25 cells/mL.

[0307] Target tumor cells were treated with trastuzumab, Janus Trastuzumab 2, Janus LOF, or isotype control (IgG) overnight (˜15 hours) at a concentration of 10 μg/mL. For a direct killing control, target tumor cells were treated with PBS.

[0308] ADCC assays were carried out at multiple effector:target (E:T) ratios and each ratio was set up in triplicate. 50 pL of NK cells were aliquoted into wells of a 96-well V-bottom assay plate, and 50 pL of the previously treated target cells (BT-20, HT-29 or SK-BR-3) were added. Control wells included target cells only (10,000), NK cells only (20,000, 40,000 or 60,000), target and lysis buffer, media only, and media and lysis buffer. Assay plates were incubated at 37° C. for 4 hours, after which the assay plate was centrifuged at 250 g for 5 minutes and 50 pL of assay supernatant was transferred to a 96-well flat-bottom plate with dark walls and clear bottoms. 50 μL of LDH reaction mixture was added, and after incubation at room temperature for 30 minutes, 50 μL of stop solution was added. Spectrophotometric absorbance was measured at 490 and 680 nm wavelengths using a SpectraMax i3× (Molecular Devices) spectrophotometer.

[0309] Corrected values were generated by subtracting the average value of the culture medium background control from average values of the experimental, effector cell spontaneous, LDH release controls and target cell spontaneous LDH release control. The average value of the volume correction control was then subtracted from the average value of the target cell lysis LDH release control. Percent cytotoxicity was calculated using the following formula: % cytotoxicity=(experimental value-effector cell spontaneous control-target cell spontaneous control)*100/(target cell maximum control-target cell spontaneous control).

[0310] Results are shown in FIG. 15. FIG. 15A depicts targeted killing of BT-20 cells, FIG. 15B depicts targeted killing of HT-29 cells, and FIG. 15C depicts targeted killing of SKBR3 cells. As depicted, ADCC was maintained for the ASCs and was comparable to that of trastuzumab.

[0311] For ADCP assays, the source of effector cells was cytokine-induced and cultured M2-like macrophages generated from CD14+ monocytes. PBMCs were isolated from Leukopaks (ZenBio) by Ficoll density gradient (GE Healthcare Biosciences) following the manufacturer's protocol. From the PBMCs, CD14+ monocytes were isolated using magnetic beads and cultured for 5 days in RPMI-1640 medium containing 20% heat-inactivated fetal bovine serum, antibiotics, and 50 ng/mL recombinant human M-CSF. On day 7, M0/M2-like macrophages were lifted off the culture dish by Accutase treatment and gentle scrapping and reseeded on a 24-well tissue culture dish (50,000 cells per well) using the same culture media supplemented with IL-10 (20 ng/mL), TGF-0 (50 ng/mL), and M-CSF (20 ng/ml), and incubated at 37° C. for 48 hours for polarization to M2 phenotypes. On the day of phagocytosis assays, polarized M2-like macrophages were lifted off by treatment with Accutase and gentle scrapping, washed, and counted.

[0312] BT-20 (breast), HT-29 (colorectal) and SK-BR-3 (breast) tumor cell lines were used as target cells. Target tumor cell lines were cultured in appropriate media supplemented with 10% heat-inactivated fetal bovine serum, antibiotics, non-essential amino acids, pyruvic acid and grown to logarithmic growth phase by passaging them 2-3 times. A day prior to phagocytosis assays, target cells (BT-20, HT-29 and SK-BR-3) were harvested by treating with Accutase, washed, counted, and labeled with carboxyfluorescein succinimidyl ester (CFSE). Target tumor cells then underwent treatment overnight with trastuzumab, Janus Trastuzumab 2, Janus-LOF, or isotype control (IgG) at concentrations of 10 and 30 μg/mL. Treatment with PBS was used as a control.

[0313] Internalization/phagocytosis of target cells by phagocytes (M2-like macrophages) result in CFSE-positive phagocytes. % Phagocytosis or % killing was calculated by measuring CFSE+M2-like macrophages by flow cytometry. All phagocytosis assays were done in triplicates. Phagocytosis assays were set up in flat-bottom 48-well plates in triplicate at an effector:target (E:T) ratio of 1:5 (50,000 effector cells and 250,000 target cells). The assay plate was incubated at 37° C. for 2 hours, after which cells were scraped off the assay plate, washed and stained for live/dead, CD45, and CD14, and fixed using 4% paraformaldehyde for 10 minutes at room temperature. Cells were washed in PBS twice and resuspended in FACS staining buffer. Single-stained M2 cells and CFSE labeled only target cells were used as controls. Cells were run for flow cytometry using a BD FACS Celesta (Becton Dickinson) FACS analyzer. Results were analyzed using the FloJo (Tree Star/Becton Dickinson) software program and % killing was calculated. The results are shown in FIG. 16.

[0314] FIG. 16A depicts percent killing by phagocytosis of BT-20 cells, FIG. 16B depicts percent killing by phagocytosis of HT-29 cells and FIG. 16C depicts percent killing by phagocytosis of SKBR-3. As shown, ADCP was maintained for the ASCs and was comparable to trastuzumab.

### Example 6

[0315] This Example describes the in vivo administration of anti-HER2 antibody sialidase conjugates (ASCs).

[0316] Janus Trastuzumab 2, as described above in Example 2, and including a first polypeptide chain with amino acid sequence SEQ ID NO: 66, encoded by nucleotide sequence SEQ ID NO: 86, a second polypeptide chain with amino acid sequence SEQ ID NO: 189, encoded by nucleotide sequence SEQ ID NO: 245, and a third polypeptide chain with amino acid sequence SEQ ID NO: 205, encoded by nucleotide sequence SEQ ID NO: 246, and Janus LOF, as described above in Example 2, and including a first polypeptide chain with amino acid sequence SEQ ID NO: 66, encoded by nucleotide sequence SEQ ID NO: 86, a second polypeptide chain with amino acid sequence SEQ ID NO: 189, encoded by nucleotide sequence SEQ ID NO: 245, and a third polypeptide chain with amino acid sequence SEQ ID NO: 250, encoded by nucleotide sequence SEQ ID NO: 251, were made and tested in this Example.

[0317] Janus Trastuzumab 2 was compared to isotype control antibody, trastuzumab, and Janus LOF in a mouse syngeneic tumor model injected with a murine breast cancer cell line stably expressing human HER2 (EMT6-HER2). Mice, 6-8 weeks of age, were inoculated subcutaneously in the right lower flank region with HER2-expressing cells for tumor development. Mice were randomly allocated to 6 groups of 8 animals each when tumors reached a mean ˜75-100 mm³ and treated as shown in TABLE 14.

TABLE 14

| Group | Treatment | Dose | | Route | Schedule |
|---|---|---|---|---|---|
| 1 | Isotype Control | 10 | mg/kg | IP | Twice per |
| 2 | Trastuzumab | 5 | mg/kg | | week; 6 doses |
| 3 | Janus LOF | 10 | mg/kg | | |
| 4 | Janus Trastuzumab 2 | 1 | mg/kg | | |
| 5 | Janus Trastuzumab 2 | 3 | mg/kg | | |
| 6 | Janus Trastuzumab 2 | 10 | mg/kg | | |

[0318] Mice were treated with intraperitoneal injections of the indicated test article and dosed twice per week and tumor volume (mm3) was recorded.

[0319] Tumor volumes for individual mice are shown in FIGS. 17A-17F. Average tumor volumes for mice treated with Janus Trastuzumab 2 (10 mg/kg) or Janus LOF (10 mg/kg) are shown FIG. 18A. Survival curves for mice treated with Janus Trastuzumab 2, Janus LOF or trastuzumab are shown in FIG. 18B. As shown, treatment with Janus Trastuzumab 2 resulted in reduced tumor growth relative to treatment with Janus LOF. Additionally, treatment with Janus Trastuzumab 2 resulted in increased survival relative to treatment with Janus LOF or trastuzumab.

### INCORPORATION BY REFERENCE

[0320] The entire disclosure of each of the patent and scientific documents referred to herein is incorporated by reference for all purposes.

### EQUIVALENTS

[0321] The invention may be embodied in other specific forms without departing from the spirit or essential characteristics thereof. The foregoing embodiments are therefore to be considered in all respects illustrative rather than limiting on the invention described herein. Scope of the invention is thus indicated by the appended claims rather than by the foregoing description, and all changes that come within the meaning and range of equivalency of the claims are intended to be embraced therein.

The application's sequence listing, which the Patent Office published only in electronic form, follows.

SEQUENCE LISTING (254 sequences)

SEQ ID NO: 1 - protein, 380 aa, Homo sapiens
MASLPVLQKESVFQSGAHAYRIPALLYLPGQQSLLAFAEQRASKKDEHAELIVLRRGDYDAPTHQVQWQAQEVVAQARLDGHRSMNPCPLYDAQTGTLFLFFIAIPGQVTEQQQLQTRANVTRLCQVTSTDHGRTWSSPRDLTDAAIGPAYREWSTFAVGPGHCLQLHDRARSLVVPAYAYRKLHPIQRPIPSAFCFLSHDHGRTWARGHFVAQDTLECQVAEVETGEQRVVTLNARSHLRARVQAQSTNDGLDFQESQLVKKLVEPPPQGCQGSVISFPSPRSGPGSPAQWLLYTHPTHSWQRADLGAYLNPRPPAPEAWSEPVLLAKGSCAYSDLQSMGTGPDGSPLFGCLYEANDYEEIVFLMFTLKQAFPAEYLPQ

SEQ ID NO: 2 - protein, 385 aa, Mus musculus
MEDLRPMATCPVLQKETLFRTGVHAYRIPALLYLKKQKTLLAFAEKRASKTDEHAELIVLRRGSYNEATNRVKWQPEEVVTQAQLEGHRSMNPCPLYDKQTKTLFLFFIAVPGRVSEHHQLHTKVNVTRLCCVSSTDHGRTWSPIQDLTETTIGSTHQEWATFAVGPGHCLQLRNPAGSLLVPAYAYRKLHPAQKPTPFAFCFISLDHGHTWKLGNFVAENSLECQVAEVGTGAQRMVYLNARSFLGARVQAQSPNDGLDFQDNRVVSKLVEPPHGCHGSVVAFHNPISKPHALDTWLLYTHPTDSRNRTNLGVYLNQMPLDPTAWSEPTLLAMGICAYSDLQNMGQGPDGSPQFGCLYESGNYEEIIFLIFTLKQAFPTVFDAQ

SEQ ID NO: 3 - protein, 5 aa, Mus musculus
EDLRP

SEQ ID NO: 4 - protein, 6 aa, Mus musculus
MEDLRP

SEQ ID NO: 5 - protein, 227 aa, Artificial Sequence
  Description of Artificial Sequence: Synthetic polypeptide
DKTHTCPPCPAPELLGGPSVFLFPPKPKDTLMISRTPEVTCVVVDVSHEDPEVKFNWYVDGVEVHNAKTKPREEQYNSTYRVVSVLTVLHQDWLNGKEYKCKVSNKALPAPIEKTISKAKGQPREPQVYTLPPSREEMTKNQVSLTCLVKGFYPSDIAVEWESNGQPENNYKTTPPVLDSDGSFFLYSKLTVDKSRWQQGNVFSCSVMHEALHNHYTQKSLSLSPGK

SEQ ID NO: 6 - DNA, 1143 bp, Salmonella typhimurium
acagtggaaaagtccgtggtgttcaaggccgagggcgagcacttcaccgaccagaaaggcaataccatcgtcggctctggcagcggcggcaccaccaagtactttagaatccccgccatgtgcaccaccagcaagggcaccattgtggtgttcgccgacgccagacacaacaccgccagcgatcagagcttcatcgataccgctgccgccagatctaccgatggcggcaagacctggaacaagaagatcgccatctacaacgaccgcgtgaacagcaagctgagcagagtgatggaccctacctgcatcgtggccaacatccagggcagagaaaccatcctggtcatggtcggaaagtggaacaacaacgataagacctggggcgcctacagagacaaggcccctgataccgattgggacctcgtgctgtacaagagcaccgatgacggcgtgaccttcagcaaggtggaaacaaacatccacgacatcgtgaccaagaacggcaccatctctgccatgctcggcggcgttggatctggcctgcaactgaatgatggcaagctggtgttccccgtgcagatggtccgaacaaagaatatcaccaccgtgctgaataccagcttcatctacagcaccgacggcatcacatggtccctgcctagcggctactgtgaaggctttggcagcgagaacaacatcatcgagttcaacgccagcctggtcaacaacatccggaacagcggcctgcggagaagcttcgagacaaaggacttcggaaagacgtggaccgagtttcctccaatggacaagaaggtggacaaccggaaccacggcgtgcagggcagcacaatcacaatccctagcggcaacaaactggtggccgctcactctagcgcccagaacaagaacaacgactacaccagaagcgacatcagcctgtacgcccacaacctgtacagcggcgaagtgaagctgatcgacgacttctaccccaaagtgggcaatgccagcggagccggctacagctgtctgagctaccggaaaaatgtggacaaagaaaccctgtacgtggtgtacgaggccaacggcagcatcgagtttcaggacctgagcagacatctgcccgtgatcaagagctacaac

SEQ ID NO: 7 - protein, 364 aa, Homo sapiens
ENDFGLVQPLVTMEQLLWVSGRQIGSVDTFRIPLITATPRGTLLAFAEARKMSSSDEGAKFIALRRSMDQGSTWSPTAFIVNDGDVPDGLNLGAVVSDVETGVVFLFYSLCAHKAGCQVASTMLVWSKDDGVSWSTPRNLSLDIGTEVFAPGPGSGIQKQREPRKGRLIVCGHGTLERDGVFCLLSDDHGASWRYGSGVSGIPYGQPKQENDFNPDECQPYELPDGSVVINARNQNNYHCHCRIVLRSYDACDTLRPRDVTFDPELVDPVVAAGAVVTSSGIVFFSNPAHPEFRVNLTLRWSFSNGTSWRKETVQLWPGPSGYSSLATLEGSMDGEEQAPQLYVLYEKGRNHYTESISVAKISV

SEQ ID NO: 8 - protein, 428 aa, Homo sapiens
MEEVTTCSFNSPLFRQEDDRGITYRIPALLYIPPTHTFLAFAEKRSTRRDEDALHLVLRRGLRIGQLVQWGPLKPLMEATLPGHRTMNPCPVWEQKSGCVFLFFICVRGHVTERQQIVSGRNAARLCFIYSQDAGCSWSEVRDLTEEVIGSELKHWATFAVGPGHGIQLQSGRLVIPAYTYYIPSWFFCFQLPCKTRPHSLMIYSDDLGVTWHHGRLIRPMVTVECEVAEVTGRAGHPVLYCSARTPNRCRAEALSTDHGEGFQRLALSRQLCEPPHGCQGSVVSFRPLEIPHRCQDSSSKDAPTIQQSSPGSSLRLEEEAGTPSESWLLYSHPTSRKQRVDLGIYLNQTPLEAACWSRPWILHCGPCGYSDLAALEEEGLFGCLFECGTKQECEQIAFRLFTHREILSHLQGDCTSPGRNPSQFKSN

SEQ ID NO: 9 - protein, 461 aa, Homo sapiens
MRPADLPPRPMEESPASSSAPTETEEPGSSAEVMEEVTTCSFNSPLFRQEDDRGITYRIPALLYIPPTHTFLAFAEKRSTRRDEDALHLVLRRGLRIGQLVQWGPLKPLMEATLPGHRTMNPCPVWEQKSGCVFLFFICVRGHVTERQQIVSGRNAARLCFIYSQDAGCSWSEVRDLTEEVIGSELKHWATFAVGPGHGIQLQSGRLVIPAYTYYIPSWFFCFQLPCKTRPHSLMIYSDDLGVTWHHGRLIRPMVTVECEVAEVTGRAGHPVLYCSARTPNRCRAEALSTDHGEGFQRLALSRQLCEPPHGCQGSVVSFRPLEIPHRCQDSSSKDAPTIQQSSPGSSLRLEEEAGTPSESWLLYSHPTSRKQRVDLGIYLNQTPLEAACWSRPWILHCGPCGYSDLAALEEEGLFGCLFECGTKQECEQIAFRLFTHREILSHLQGDCTSPGRNPSQFKSN

SEQ ID NO: 10 - protein, 484 aa, Homo sapiens
MGVPRTPSRTVLFERERTGLTYRVPSLLPVPPGPTLLAFVEQRLSPDDSHAHRLVLRRGTLAGGSVRWGALHVLGTAALAEHRSMNPCPVHDAGTGTVFLFFIAVLGHTPEAVQIATGRNAARLCCVASRDAGLSWGSARDLTEEAIGGAVQDWATFAVGPGHGVQLPSGRLLVPAYTYRVDRRECFGKICRTSPHSFAFYSDDHGRTWRCGGLVPNLRSGECQLAAVDGGQAGSFLYCNARSPLGSRVQALSTDEGTSFLPAERVASLPETAWGCQGSIVGFPAPAPNRPRDDSWSVGPGSPLQPPLLGPGVHEPPEEAAVDPRGGQVPGGPFSRLQPRGDGPRQPGPRPGVSGDVGSWTLALPMPFAAPPQSPTWLLYSHPVGRRARLHMGIRLSQSPLDPRSWTEPWVIYEGPSGYSDLASIGPAPEGGLVFACLYESGARTSYDEISFCTFSLREVLENVPASPKPPNLGDKPRGCCWPS

SEQ ID NO: 11 - protein, 496 aa, Homo sapiens
MMSSAAFPRWLSMGVPRTPSRTVLFERERTGLTYRVPSLLPVPPGPTLLAFVEQRLSPDDSHAHRLVLRRGTLAGGSVRWGALHVLGTAALAEHRSMNPCPVHDAGTGTVFLFFIAVLGHTPEAVQIATGRNAARLCCVASRDAGLSWGSARDLTEEAIGGAVQDWATFAVGPGHGVQLPSGRLLVPAYTYRVDRRECFGKICRTSPHSFAFYSDDHGRTWRCGGLVPNLRSGECQLAAVDGGQAGSFLYCNARSPLGSRVQALSTDEGTSFLPAERVASLPETAWGCQGSIVGFPAPAPNRPRDDSWSVGPGSPLQPPLLGPGVHEPPEEAAVDPRGGQVPGGPFSRLQPRGDGPRQPGPRPGVSGDVGSWTLALPMPFAAPPQSPTWLLYSHPVGRRARLHMGIRLSQSPLDPRSWTEPWVIYEGPSGYSDLASIGPAPEGGLVFACLYESGARTSYDEISFCTFSLREVLENVPASPKPPNLGDKPRGCCWPS

SEQ ID NO: 12 - protein, 5 aa, Homo sapiens
MASLP

SEQ ID NO: 13 - protein, 4 aa, Homo sapiens
ASLP

SEQ ID NO: 14 - protein, 8 aa, Salmonella typhimurium
TVEKSVVF

SEQ ID NO: 15 - protein, 12 aa, Homo sapiens
GDYDAPTHQVQW

SEQ ID NO: 16 - protein, 8 aa, Homo sapiens
SMDQGSTW

SEQ ID NO: 17 - protein, 8 aa, Salmonella typhimurium
STDGGKTW

SEQ ID NO: 18 - protein, 8 aa, Homo sapiens
PRPPAPEA

SEQ ID NO: 19 - protein, 8 aa, Homo sapiens
QTPLEAAC

SEQ ID NO: 20 - protein, 9 aa, Homo sapiens
NPRPPAPEA

SEQ ID NO: 21 - protein, 7 aa, Unknown
  Description of Unknown: Recombinant mutant human sialidase substitution sequence
SQNDGES

SEQ ID NO: 22 - protein, 7 aa, Unknown
  Description of Unknown: Recombinant mutant human sialidase substitution sequence
LSHSLST

SEQ ID NO: 23 - DNA, 1092 bp, Homo sapiens
gagaacgactttggactggtgcagcctctggtcaccatggaacagctgctgtgggtttccggcagacagatcggcagcgtggacaccttcagaatccctctgatcaccgccacacctagaggcaccctgctggcctttgccgaggccagaaagatgagcagctctgacgagggcgccaagtttattgccctgaggcggtctatggaccagggctctacatggtcccctaccgccttcatcgtgaacgatggcgacgtgcccgatggcctgaatctgggagctgtggtgtccgatgtggaaaccggcgtggtgttcctgttctacagcctgtgtgcccacaaggccggttgtcaggtggccagcacaatgctcgtgtggtccaaggacgacggcgtgtcctggtctacccctagaaacctgagcctggacatcggcaccgaagtgtttgctccaggacctggctctggcatccagaagcagagagagcccagaaagggcagactgatcgtgtgtggccacggcacccttgagagagatggcgttttctgcctgctgagcgacgatcatggcgcctcttggagatacggcagcggagtgtctggaatcccttacggccagcctaagcaagagaacgatttcaaccccgacgagtgccagccttacgagctgcctgatggcagcgtcgtgatcaacgcccggaaccagaacaactaccactgccactgccggatcgtgctgagaagctacgacgcctgcgataccctgcggcctagagatgtgaccttcgatcctgagctggtggaccctgttgttgccgctggtgccgtcgtgacatctagcggcatcgtgttcttcagcaaccctgctcaccccgagttcagagtgaatctgaccctgcggtggtccttcagcaatggcacaagctggcggaaagaaaccgtgcagctttggcctggacctagcggctactcttctctggctacactggaaggcagcatggacggcgaagaacaggcccctcagctgtacgtgctgtacgagaagggcagaaaccactacaccgagagcatcagcgtggccaagatcagcgtt

SEQ ID NO: 24 - DNA, 1140 bp, Homo sapiens
atggccagcctgcctgtgctgcagaaagaaagcgtgttccagtctggcgcccacgcctacagaattcccgctctgctgtatctgccaggccagcagtctctgctggctttcgctgaacagcgggccagcaagaaggatgagcacgccgaactgatcgtgctgcggagaggcgattacgacgcccctacacatcaggtgcagtggcaggctcaagaggtggtggctcaggctagactggacggccacagatctatgaacccctgtcctctgtacgatgcccagaccggcacactgtttctgttctttatcgctatccccggccaagtgaccgagcagcagcagctgcagacaagagccaacgtgaccagactgtgtcaagtgacctccaccgaccacggcagaacctggtctagccctagagatctgaccgacgccgccatcggacctgcctatagagagtggtccaccttcgccgttggacctggacactgtctccagctgcacgacagggctagatctctggtggtgcctgcctacgcctatagaaagctgcaccccatccagcggcctattcctagcgccttctgctttctgagccacgatcacggcaggacatgggccagaggacatttcgtggcccaggacacactggaatgccaggtggccgaagtggaaaccggcgagcagagagtcgtgaccctgaacgccagatctcacctgagagccagagtgcaggcccagagcacaaacgacggcctggatttccaagagagccagctggtcaagaaactggtggaacctcctccacagggctgtcagggaagcgtgatcagctttccatctcctagaagcggccctggctctcctgctcagtggctgctgtatacacaccccacacacagctggcagagagccgatctgggcgcctacctgaatcctagacctcctgctcctgaggcttggagcgaacctgttctgctggccaagggcagctgtgcctacagcgatctgcagtctatgggcacaggccctgatggcagccctctgtttggctgtctgtacgaggccaacgactacgaagagatcgtgttcctgatgttcaccctgaagcaggcctttccagccgagtacctgcctcaa

SEQ ID NO: 25 - DNA, 1284 bp, Homo sapiens
atggaggaagtgaccacctgtagcttcaacagccctctgttccggcaagaggacgaccggggcatcacctacagaatccctgctctgctgtacatccctcctacacacacctttctggccttcgccgagaagcggagcaccagacgagatgaagatgccctgcacctggtgctgagaagaggcctgagaatcggacagctggtgcagtggggacctctgaagcctctgatggaagccacactgcccggccacagaaccatgaatccttgtcctgtgtgggagcagaaaagcggctgcgtgttcctgttcttcatctgcgtgcggggccacgtgaccgagagacagcaaatcgtgtccggcagaaacgccgccagactgtgcttcatctacagccaggatgccggctgctcttggagcgaagttcgggatctgaccgaagaagtgatcggcagcgagctgaagcactgggccacatttgctgttggccctggccacggaatccagctgcaatctggcagactggtcatccccgcctacacctactatatccccagctggttcttctgcttccaactgccttgcaagacccggcctcacagcctgatgatctacagcgacgatctgggcgtgacatggcaccacggcagactgatcagacccatggtcaccgtggaatgcgaggtggccgaagtgacaggcagagctggacaccctgtgctgtactgctctgccagaacacccaaccggtgtagagccgaggctctgtctacagatcacggcgagggctttcagagactggccctctctagacagctgtgcgaacctcctcatggctgtcagggcagcgtggtgtccttcagacctctggaaatccctcaccggtgccaggacagcagctctaaggatgcccctaccatccagcagtctagccctggcagcagcctgagactggaagaggaagccggaacacctagcgagagctggctgctgtactctcaccccaccagcagaaagcagagagtggacctgggcatctacctgaatcagacccctctggaagccgcctgttggagcagaccttggattctgcactgtggcccttgcggctactctgatctggccgctctggaagaagagggcctgttcggctgcctgtttgagtgcggcacaaagcaagagtgcgagcagatcgccttccggctgttcacccacagagagatcctgagccatctgcagggcgactgcacaagcccaggcagaaatcccagccagttcaagagcaac

SEQ ID NO: 26 - DNA, 1452 bp, Homo sapiens
atgggcgtgcccagaacacccagcagaaccgtgctgttcgagagagagaggaccggcctgacctacagagtgccttctctgctgcctgtgcctcctggacctacactgctggccttcgtggaacagagactgagccccgatgattctcacgcccacagactggtgctgagaagaggaacactggctggcggctctgttagatggggagcactgcatgtgctgggcacagctgctcttgccgagcacagatccatgaatccctgtcctgtgcacgacgccggaaccggcacagtgtttctgttctttatcgccgtgctgggccacacacctgaggccgttcaaattgccaccggcagaaatgccgccagactgtgttgtgtggcctccagagatgccggcctgtcttggggatctgccagagatctgaccgaggaagccattggcggagccgttcaggattgggccacatttgctgttggacctggacacggcgtgcagctgccaagtggtagactgctggtgcctgcctacacatacagagtggatcggagagagtgcttcggaaagatctgccggacaagccctcacagcttcgccttctactccgacgatcacggccggacttggagatgtggtggcctggtgcctaatctgagaagcggcgaatgtcaactggccgccgttgatggtggacaggctggcagcttcctgtactgcaacgccagatctcctctgggctctagagtgcaggccctgtctaccgatgagggcaccagttttctgcccgccgaaagagttgcctctctgcctgaaacagcctggggctgtcagggctctatcgtgggatttcctgctcctgctccaaacagaccccgggacgattcttggagtgtcggccctggatctccactgcagcctccattgcttggaccaggcgttcacgagccacctgaagaggctgccgttgatcctagaggcggacaagttcctggcggcccttttagcagactgcagccaagaggcgacggccctagacaacctggaccaagacctggcgtcagcggagatgttggctcttggacactggccctgcctatgccttttgccgctcctcctcagtctcctacctggctgctgtactctcaccctgttggcagacgggccagactgcacatgggcatcagactgtctcagagccctctggaccccagaagctggacagagccttgggtcatctatgagggccctagcggctacagcgatctggcctctattggcccagctcctgaaggcggactggtgttcgcttgtctgtatgagagcggcgccagaaccagctacgacgagatcagcttctgcaccttcagcctgcgcgaggtgctggaaaatgtgcccgcctctcctaagcctcctaacctgggcgataagcctagaggctgttgctggccatct

SEQ ID NO: 27 - protein, 47 aa, Homo sapiens
MTGERPSTALPDRRWGPRILGFWGGCRVWVFAAIFLLLSLAASWSKA

SEQ ID NO: 28 - protein, 22 aa, Unknown
  Description of Unknown: N-terminal signal peptide sequence
MDMRVPAQLLGLLLLWLPGARC

SEQ ID NO: 29 - protein, 4 aa, Unknown
  Description of Unknown: C-terminal lysosomal signal motif sequence
YGTL

SEQ ID NO: 30 - protein, 382 aa, Salmonella typhimurium
MTVEKSVVFKAEGEHFTDQKGNTIVGSGSGGTTKYFRIPAMCTTSKGTIVVFADARHNTASDQSFIDTAAARSTDGGKTWNKKIAIYNDRVNSKLSRVMDPTCIVANIQGRETILVMVGKWNNNDKTWGAYRDKAPDTDWDLVLYKSTDDGVTFSKVETNIHDIVTKNGTISAMLGGVGSGLQLNDGKLVFPVQMVRTKNITTVLNTSFIYSTDGITWSLPSGYCEGFGSENNIIEFNASLVNNIRNSGLRRSFETKDFGKTWTEFPPMDKKVDNRNHGVQGSTITIPSGNKLVAAHSSAQNKNNDYTRSDISLYAHNLYSGEVKLIDDFYPKVGNASGAGYSCLSYRKNVDKETLYVVYEANGSIEFQDLSRHLPVIKSYN

SEQ ID NO: 31 - protein, 232 aa, Artificial Sequence
  Description of Artificial Sequence: Synthetic polypeptide
EPKSCDKTHTCPPCPAPELLGGPSVFLFPPKPKDTLMISRTPEVTCVVVDVSHEDPEVKFNWYVDGVEVHNAKTKPREEQYNSTYRVVSVLTVLHQDWLNGKEYKCKVSNKALPAPIEKTISKAKGQPREPQVYTLPPSREEMTKNQVSLTCLVKGFYPSDIAVEWESNGQPENNYKTTPPVLDSDGSFFLYSKLTVDKSRWQQGNVFSCSVMHEALHNHYTQKSLSLSPGK

SEQ ID NO: 32 - protein, 227 aa, Artificial Sequence
  Description of Artificial Sequence: Synthetic polypeptide
DKTHTCPPCPAPELLGGPSVFLFPPKPKDTLMISRTPEVTCVVVDVSHEDPEVKFNWYVDGVEVHNAKTKPREEQYNSTYRVVSVLTVLHQDWLNGKEYKCKVSNKALPAPIEKTISKAKGQPREPQVYTLPPSREEMTKNQVSLTCLVKGFYPSDIAVEWESNGQPENNYKTTPPVLDSDGSFFLTSKLTVDKSRWQQGNVFSCSVMHEALHNHYTQKSLSLSPGK

SEQ ID NO: 33 - protein, 232 aa, Artificial Sequence
  Description of Artificial Sequence: Synthetic polypeptide
EPKSCDKTHTCPPCPAPELLGGPSVFLFPPKPKDTLMISRTPEVTCVVVDVSHEDPEVKFNWYVDGVEVHNAKTKPREEQYNSTYRVVSVLTVLHQDWLNGKEYKCKVSNKALPAPIEKTISKAKGQPREPQVYTLPPSREEMTKNQVSLYCLVKGFYPSDIAVEWESNGQPENNYKTTPPVLDSDGSFFLYSKLTVDKSRWQQGNVFSCSVMHEALHNHYTQKSLSLSPGK

SEQ ID NO: 34 - DNA, 1383 bp, Homo sapiens
atgagacctgcggacctgcccccgcgccccatggaagaatccccggcgtccagctctgccccgacagagacggaggagccggggtccagtgcagaggtcatggaagaagtgacaacatgctccttcaacagccctctgttccggcaggaagatgacagagggattacctaccggatcccagccctgctctacataccccccacccacaccttcctggcctttgcagagaagcgttctacgaggagagatgaggatgctctccacctggtgctgaggcgagggttgaggattgggcagttggtacagtgggggcccctgaagccactgatggaagccacactaccggggcatcggaccatgaacccctgtcctgtatgggagcagaagagtggttgtgtgttcctgttcttcatctgtgtgcggggccatgtcacagagcgtcaacagattgtgtcaggcaggaatgctgcccgcctttgcttcatctacagtcaggatgctggatgttcatggagtgaggtgagggacttgactgaggaggtcattggctcagagctgaagcactgggccacatttgctgtgggcccaggtcatggcatccagctgcagtcagggagactggtcatccctgcgtatacctactacatcccttcctggttcttttgcttccagctaccatgtaaaaccaggcctcattctctgatgatctacagtgatgacctaggggtcacatggcaccatggtagactcattaggcccatggttacagtagaatgtgaagtggcagaggtgactgggagggctggccaccctgtgctatattgcagtgcccggacaccaaacaggtgccgggcagaggcgctcagcactgaccatggtgaaggctttcagagactggccctgagtcgacagctctgtgagcccccacatggttgccaagggagtgtggtaagtttccggcccctggagatcccacataggtgccaggactctagcagcaaagatgcacccaccattcagcagagctctccaggcagttcactgaggctggaggaggaagctggaacaccgtcagaatcatggctcttgtactcacacccaaccagtaggaaacagagggttgacctaggtatctatctcaaccagacccccttggaggctgcctgctggtcccgcccctggatcttgcactgtgggccctgtggctactctgatctggctgctctggaggaggagggcttgtttgggtgtttgtttgaatgtgggaccaagcaagagtgtgagcagattgccttccgcctgtttacacaccgggagatcctgagtcacctgcagggggactgcaccagccctggtaggaacccaagccaattcaaaagcaat

SEQ ID NO: 35 - DNA, 1488 bp, Homo sapiens
atgatgagctctgcagccttcccaaggtggctgagcatgggggtccctcgtaccccttcacggacagtgctcttcgagcgggagaggacgggcctgacctaccgcgtgccctcgctgctccccgtgccccccgggcccaccctgctggcctttgtggagcagcggctcagccctgacgactcccacgcccaccgcctggtgctgaggaggggcacgctggccgggggctccgtgcggtggggtgccctgcacgtgctggggacagcagccctggcggagcaccggtccatgaacccctgccctgtgcacgatgctggcacgggcaccgtcttcctcttcttcatcgcggtgctgggccacacgcctgaggccgtgcagatcgccacgggaaggaacgccgcgcgcctctgctgtgtggccagccgtgacgccggcctctcgtggggcagcgcccgggacctcaccgaggaggccatcggtggtgccgtgcaggactgggccacattcgctgtgggtcccggccacggtgtgcagctgccctcaggccgcctgctggtacccgcctacacctaccgcgtggaccgccgagagtgttttggcaagatctgccggaccagccctcactccttcgccttctacagcgatgaccacggccgcacctggcgctgtggaggcctcgtgcccaacctgcgctcaggcgagtgccagctggcagcggtggacggtgggcaggccggcagcttcctctactgcaatgcccggagcccactgggcagccgtgtgcaggcgctcagcactgacgagggcacctccttcctgcccgcagagcgcgtggcttccctgcccgagactgcctggggctgccagggcagcatcgtgggcttcccagcccccgcccccaacaggccacgggatgacagttggtcagtgggccccgggagtcccctccagcctccactcctcggtcctggagtccacgaacccccagaggaggctgctgtagacccccgtggaggccaggtgcctggtgggcccttcagccgtctgcagcctcggggggatggccccaggcagcctggccccaggcctggggtcagtggggatgtggggtcctggaccctggcactccccatgccctttgctgccccgccccagagccccacgtggctgctgtactcccacccagtggggcgcagggctcggctacacatgggtatccgcctgagccagtccccgctggacccgcgcagctggacagagccctgggtgatctacgagggccccagcggctactccgacctggcgtccatcgggccggcccctgaggggggcctggtttttgcctgcctgtacgagagcggggccaggacctcctatgatgagatttccttttgtacattctccctgcgtgaggtcctggagaacgtgcccgccagccccaaaccgcccaaccttggggacaagcctcgggggtgctgctggccctcc

SEQ ID NO: 36 - protein, 781 aa, Vibrio cholerae
MRFKNVKKTALMLAMFGMATSSNAALFDYNATGDTEFDSPAKQGWMQDNTNNGSGVLTNADGMPAWLVQGIGGRAQWTYSLSTNQHAQASSFGWRMTTEMKVLSGGMITNYYANGTQRVLPIISLDSSGNLVVEFEGQTGRTVLATGTAATEYHKFELVFLPGSNPSASFYFDGKLIRDNIQPTASKQNMIVWGNGSSNTDGVAAYRDIKFEIQGDVIFRGPDRIPSIVASSVTPGVVTAFAEKRVGGGDPGALSNTNDIITRTSRDGGITWDTELNLTEQINVSDEFDFSDPRPIYDPSSNTVLVSYARWPTDAAQNGDRIKPWMPNGIFYSVYDVASGNWQAPIDVTDQVKERSFQIAGWGGSELYRRNTSLNSQQDWQSNAKIRIVDGAANQIQVADGSRKYVVTLSIDESGGLVANLNGVSAPIILQSEHAKVHSFHDYELQYSALNHTTTLFVDGQQITTWAGEVSQENNIQFGNADAQIDGRLHVQKIVLTQQGHNLVEFDAFYLAQQTPEVEKDLEKLGWTKIKTGNTMSLYGNASVNPGPGHGITLTRQQNISGSQNGRLIYPAIVLDRFFLNVMSIYSDDGGSNWQTGSTLPIPFRWKSSSILETLEPSEADMVELQNGDLLLTARLDFNQIVNGVNYSPRQQFLSKDGGITWSLLEANNANVFSNISTGTVDASITRFEQSDGSHFLLFTNPQGNPAGTNGRQNLGLWFSFDEGVTWKGPIQLVNGASAYSDIYQLDSENAIVIVETDNSNMRILRMPITLLKQKLTLSQN

SEQ ID NO: 37 - DNA, 2424 bp, Vibrio cholerae
ttgtcaatcaagatgacttcacaacgaagaagagcatcgattcacaaggaaacagattctaatataaagggagtagatatgcgtttcaaaaacgtaaagaaaaccgctttaatgcttgcaatgttcggtatggcgacaagctcaaacgccgcactttttgactataacgcaacgggtgacactgagtttgacagtccagccaaacagggatggatgcaagacaacacgaataatggcagcggcgttttaaccaatgcagatggaatgcccgcttggttggtgcaaggtattggagggagagctcaatggacatattctctctctactaatcaacatgcccaagcatcaagtttcggttggcgaatgacgacagaaatgaaagtgctcagtggtggaatgatcacaaactactacgccaacggcactcagcgtgtcttacccatcatttcattagatagcagtggtaacttagttgttgagtttgaagggcaaactggacgcaccgttttggcaaccggcacagcagcaacggaatatcataaatttgaattggtattccttcctggaagtaacccatccgctagcttttacttcgatggcaaactcattcgtgacaacatccagccgactgcatcaaaacaaaatatgatcgtatgggggaatggctcatcaaatacggatggtgtcgccgcttatcgtgatattaagtttgaaattcaaggcgacgtcatcttcagaggcccagaccgtataccgtccattgtagcaagtagcgtaacaccaggggtggtaaccgcatttgcagagaaacgtgtggggggaggagatcccggtgctctgagtaataccaatgacataatcactcgtacctcacgagatggcggtataacttgggataccgagctcaacctcactgagcaaatcaatgtcagtgatgagtttgatttctccgatcctcggcctatctatgatccttcctccaatacggttcttgtctcttatgctcgatggccgaccgatgccgctcaaaacggagatcgaataaaaccatggatgccaaacggtattttttacagcgtctatgatgttgcatcagggaactggcaagcgcctatcgatgttaccgatcaggtgaaagaacgcagtttccaaatcgctggttggggtggttcagagctgtatcgccgaaataccagcctaaatagccagcaagactggcaatcaaacgctaagatccgaattgttgatggtgcagcgaaccagatacaagttgccgatggtagccgaaaatatgttgtcacactgagtattgatgaatcaggtggtctagtcgctaatctaaacggtgttagtgctccgattatcctgcaatctgaacacgcaaaggtacactctttccatgactacgaacttcaatattcggcgttaaaccacaccacaacgttattcgtggatggtcagcaaatcacaacttgggctggcgaagtatcgcaggagaacaacattcagtttggtaatgcggatgcccaaattgacggcagactgcatgtgcaaaaaattgttctcacacagcaaggccataacctcgtggagtttgatgctttctatttagcacagcaaacccctgaagtagagaaagaccttgaaaagcttggttggacaaaaattaaaacgggcaacaccatgagtttgtatggaaatgccagtgtcaacccaggaccgggtcatggcatcacccttactcgacaacaaaatatcagtggcagccaaaacggccgcttgatctacccagcgattgtgcttgatcgtttcttcttgaacgtcatgtctatttacagtgatgatggcggttcaaactggcaaaccggttcaacactccctatcccctttcgctggaagagttcgagtatcctagaaactctcgaacctagtgaagctgatatggttgaactccaaaacggtgatctactccttactgcacgccttgattttaaccaaatcgttaatggtgtgaactatagcccacgccagcaatttttgagtaaagatggtggaatcacgtggagcctacttgaggctaacaacgctaacgtctttagcaatatcagtactggtaccgttgatgcttctattactcggttcgagcaaagtgacggtagccatttcttactctttactaacccacaaggaaaccctgcggggacaaatggcaggcaaaatctaggcttatggtttagcttcgatgaaggggtgacatggaaaggaccaattcaacttgttaatggtgcatcggcatattctgatatttatcaattggattcggaaaatgcgattgtcattgttgaaacggataattcaaatatgcgaattcttcgtatgcctatcacattgctaaaacagaagctgaccttatcgcaaaactaa

SEQ ID NO: 38 - protein, 409 aa, Mus musculus
MVGADPTRPRGPLSYWAGRRGQGLAAIFLLLVSAAESEARAEDDFSLVQPLVTMEQLLWVSGKQIGSVDTFRIPLITATPRGTLLAFAEARKKSASDEGAKFIAMRRSTDQGSTWSSTAFIVDDGEASDGLNLGAVVNDVDTGIVFLIYTLCAHKVNCQVASTMLVWSKDDGISWSPPRNLSVDIGTEMFAPGPGSGIQKQREPGKGRLIVCGHGTLERDGVFCLLSDDHGASWHYGTGVSGIPFGQPKHDHDFNPDECQPYELPDGSVIINARNQNNYHCRCRIVLRSYDACDTLRPRDVTFDPELVDPVVAAGALATSSGIVFFSNPAHPEFRVNLTLRWSFSNGTSWLKERVQVWPGPSGYSSLTALENSTDGKKQPPQLFVLYEKGLNRYTESISMVKISVYGTL

SEQ ID NO: 39 - protein, 393 aa, Mus musculus
MTVQPSPWFSDLRPMATCPVLQKETLFRTGVHAYRIPALLYLKKQKTLLAFAEKRASKTDEHAELIVLRRGSYNEATNRVKWQPEEVVTQAQLEGHRSMNPCPLYDKQTKTLFLFFIAVPGRVSEHHQLHTKVNVTRLCCVSSTDHGRTWSPIQDLTETTIGSTHQEWATFAVGPGHCLQLRNPAGSLLVPAYAYRKLHPAQKPTPFAFCFISLDHGHTWKLGNFVAENSLECQVAEVGTGAQRMVYLNARSFLGARVQAQSPNDGLDFQDNRVVSKLVEPPHGCHGSVVAFHNPISKPHALDTWLLYTHPTDSRNRTNLGVYLNQMPLDPTAWSEPTLLAMGICAYSDLQNMGQGPDGSPQFGCLYESGNYEEIIFLIFTLKQAFPTVFDAQ

SEQ ID NO: 40 - protein, 418 aa, Mus musculus
MEEVPPYSLSSTLFQQEEQSGVTYRIPALLYLPPTHTFLAFAEKRTSVRDEDAACLVLRRGLMKGRSVQWGPQRLLMEATLPGHRTMNPCPVWEKNTGRVYLFFICVRGHVTERCQIVWGKNAARLCFLCSEDAGCSWGEVKDLTEEVIGSEVKRWATFAVGPGHGIQLHSGRLIIPAYAYYVSRWFLCFACSVKPHSLMIYSDDFGVTWHHGKFIEPQVTGECQVAEVAGTAGNPVLYCSARTPSRFRAEAFSTDSGGCFQKPTLNPQLHEPRTGCQGSVVSFRPLKMPNTYQDSIGKGAPATQKCPLLDSPLEVEKGAETPSATWLLYSHPTSKRKRINLGIYYNRNPLEVNCWSRPWILNRGPSGYSDLAVVEEQDLVACLFECGEKNEYERIDFCLFSDHEVLSCEDCTSPSSD

SEQ ID NO: 41 - protein, 501 aa, Mus musculus
METAGAPFCFHVDSLVPCSYWKVMGPTRVPRRTVLFQRERTGLTYRVPALLCVPPRPTLLAFAEQRLSPDDSHAHRLVLRRGTLTRGSVRWGTLSVLETAVLEEHRSMNPCPVLDEHSGTIFLFFIAVLGHTPEAVQIATGKNAARLCCVTSCDAGLTWGSVRDLTEEAIGAALQDWATFAVGPGHGVQLRSGRLLVPAYTYHVDRRECFGKICWTSPHSLAFYSDDHGISWHCGGLVPNLRSGECQLAAVDGDFLYCNARSPLGNRVQALSADEGTSFLPGELVPTLAETARGCQGSIVGFLAPPSIEPQDDRWTGSPRNTPHSPCFNLRVQESSGEGARGLLERWMPRLPLCYPQSRSPENHGLEPGSDGDKTSWTPECPMSSDSMLQSPTWLLYSHPAGRRARLHMGIYLSRSPLDPHSWTEPWVIYEGPSGYSDLAFLGPMPGASLVFACLFESGTRTSYEDISFCLFSLADVLENVPTGLEMLSLRDKAQGHCWPS

SEQ ID NO: 42 - DNA, 3850 bp, Mus musculus
gggtcacatgctgatggactaattggagtcgcggcagcgcgggctgcggcccccaaggggaggggtcggagtgacgtgcgcgcttttaaagggccgaggtcagctgacggcttgccaccggtgaccagttcctggacagggatcgccgggagctatggtgggggcagacccgaccagaccccggggaccgctgagctattgggcgggccgtcggggtcaggggctcgcagcgatcttcctgctcctggtgtccgcggcggaatccgaggccagggcagaggatgacttcagcctggtgcagccgctggtgaccatggagcagctgctgtgggtgagcgggaagcagatcggctctgtagacactttccgcatcccgctcatcacagccacccctcggggcacgctcctggccttcgctgaggccaggaaaaaatctgcatccgatgagggggccaagttcatcgccatgaggaggtccacggaccagggtagcacgtggtcctctacagccttcatcgtagacgatggggaggcctccgatggcctgaacctgggcgctgtggtgaacgatgtagacacagggatagtgttccttatctataccctctgtgctcacaaggtcaactgccaggtggcctctaccatgttggtttggagtaaggacgacggcatttcctggagcccaccccggaatctctctgtggatattggcacagagatgtttgcccctggacctggctcaggcattcagaaacagcgggagcctgggaagggccggctcattgtgtgtggacacgggacgctggagcgagatggggtcttctgtctcctcagtgatgaccacggtgcctcctggcactacggcactggagtgagcggcattccctttggccagcccaaacacgatcacgatttcaaccccgacgagtgccagccctacgagcttccagatggctcggtcatcatcaacgcccggaaccagaataactaccattgccgctgcaggatcgtcctccgcagctatgacgcctgtgacaccctcaggccccgggatgtgaccttcgaccctgagctcgtggaccctgtggtagctgcaggagcactagccaccagctccggcattgtcttcttctccaatccagcccaccctgagttccgagtgaacctgaccctgcgctggagtttcagcaatggtacatcctggcagaaggagagggtccaggtgtggccgggacccagcggctactcgtccctgacagccctggaaaacagcacggatggaaagaagcagcccccgcagctgttcgttctgtacgagaaaggcctgaaccggtacaccgagagcatctccatggtcaaaatcagcgtctacggcacgctctgagccccgtgcccaaaggacaccaagtcctggtcgctgacttcacagctctctggaccatctgcagagggtgcctgaaacacagctcttcctctgaactctgaccttttgcaacttctcatcaacagggaagtctcttcgttatgacttaacacccagcttcctctcggggcaggaagtccctccgtcaccaagagcacttttttccagtatgctggggatggcccctgtccattctcttccaggacaacggagctgtgcctttctgggacaggatgggggaggggctccccctggagagatgaacagatacgaactcagggaactgagaaggcccggtgtcctagggtacaaaggcaggtactagatgtgattgctgaaagtccccagggcagagtgtcctttcagagcaaggataagcacacctacgtgtgcacctttgattatttatgaatcgaaatatttgtaacttaaaatttttgatgcagaaaaagcgtttgtggagtctgtggttctgtctgctcacgccttcccaattgcctcctggagagacaggaaggcagctggaagaggagccgatgtacttactgggaagcagaaacccctagattccatcctggctgctgctgtttgcaagtgtcaaagatgggggggcgtgtttatattttatatttctaagatggggtggcataggaaatagggaacagatgtgtaaaaccagatgggaaggacagtctgtgagaaaggagcaagcagttgctgcaggtgtgggagagcaaagcccttctccacgtggaaagagcccagatggacgctaagcatgttgggcacctgtaaccccgcactcgctggactgacggtgtagctcagtggtggagctagtacttggaacgcctaagactctgggttcagtccttgggggggggggtatgtgtttattgagaggaaggtgtacgtactgtaggtcagaggacagcttactggagttgtctctctccttcacgctgtgagtcctgtggaatgacctcaggtgtcagagttgggggcaggtgcctttgccagctgagccatcttgctgtctctgctttaatttaaaaaaaaaaaaaaaaaagaatattaaggtctgagggattcgggctgcgttcatttcaattagagggtcatatttcttttgacatttcttctctaagaaatgttaagatcatttgttctgtgtgatagaggtatagctccattgtatgtcagcagtgagggatcctgtgcattttatccagagtttgtacggtgttctaggggctgctagtgcagcccagtgctaaacacttcagcatgcacaaggcctcaatcagtgcatgcatgtgcacacacacacagacacacacgtacacactgacacaggtacacaaatacacactggcccacatgtacacatcgactcacaggtacacagacccactttgacacacatatacacagacacaaacgcactggcacacacatatacacaggcacacatggatagatggacacacgtgtacacatacacacacacacagaaatacaaatgttcaggttttctaaaaaaaaaaaaattagagacgtgttgacttcatttttagcaaaaatcctgtcatgtatcttaaagtggattgaacccactatgtagcccaggctggcctccaaatgggcatccttctgcctcagtctcccgagggctaggataacaggagtatgccatcacacctggctaatagaaattttcaaaattgtttgtttgaaggtgactcttactatattgcctaactgatctccagttcgtgaaatcctcctgcctcagaaccaggactgtcaatataacccaccaagacaggccaacattcacaattgattgttagtttgtggtctgaatcaaggtcttatactgtagcccaggctagcccggaatacacgatatctccagtgcttcagatcctcagttctaactaagcatggccacatccatgtttaactgcaaatttgatgttaccatggtttggtttggtttggtttggtttggtttggtttggtttggttttttggccattttttttttctcatgctgaggccttgtgctctcaagttggggagacagcatggagggtagctgcaactgtaaccccagttccaggggacctgacaccctctggcctccacaagtattaggcacatctgtggtgcacagacatacaatcaggcaaaatattcatacacataaaataaaataatttaaaacaaaagcaaaaatcaggacctaagaaaaaaatctattcctgattcttttatgttttgtttgtattttatcaagacagggttgtttctctgtatagccctggctgtcttggaattcactctgtagaccaggctggcctcaaactcagaaatcctcctgcctttgccttccaagtgctggaattaaaggcatgcgccacc

SEQ ID NO: 43 - DNA, 1722 bp, Mus musculus
gacatgacccaaacggcccctggctgcaaggtaatatcggaagttgactaagaatggacgccccaccactgactgacccgccccctgagtctgagattggacttgtctctggatacagtcatactttgaggtactacaagttagaaactgttaggttactcagttcagtccatgacagtccaaccttctccatggttttccgatctcaggcccatggcgacctgccctgtcctgcagaaggagacactgttccgcacaggcgtccatgcttacagaatccctgctctgctctacctgaagaagcagaagaccctgctggcctttgcggaaaagcgagccagcaagacggatgagcacgcagagttgattgtcctgagaagaggaagctacaacgaagccaccaaccgtgtcaagtggcagcctgaggaagtggtgacccaagcccagctggaaggccaccgctccatgaatccatgtcccttgtatgacaagcaaacaaagaccctcttccttttcttcatcgctgtccctgggcgtgtatcagaacatcatcagctccacactaaggttaatgtcacacggctgtgctgtgtcagcagcactgaccatgggaggacctggagccccatccaggacctcacagagaccaccattggcagcactcatcaggaatgggccacatttgctgtgggtcctgggcattgtctgcagctgcggaacccagctgggagcctgctggtacctgcttatgcctaccggaaactgcaccctgctcagaagcctaccccctttgccttctgcttcatcagccttgaccatgggcacacatggaaactaggcaactttgtggctgaaaactcactggagtgccaggtggctgaggttggcactggagctcagaggatggtatatctcaatgctaggagcttcctgggagccagggtccaggcacaaagtcctaatgatggtctggatttccaggacaaccgggtagtgagtaagcttgtagagcccccccacgggtgtcatggaagtgtggttgccttccacaaccccatctctaagccacatgccttagacacatggcttctttatacacaccctacagactccaggaatagaaccaacctgggtgtgtacctaaaccagatgccactagatcccacagcctggtcagagcccaccctgctggccatgggcatctgtgcctactcagacttacagaacatggggcaaggccctgatggctccccacagtttgggtgtctgtatgaatcaggtaactatgaagagatcattttcctcatattcaccctgaagcaagctttccccactgtatttgatgcccagtgatctcagtgcacgtggcccaaagggcttccttgtgcttcaaaacacccatctctctttgcttccagcatcctctggactcttgagtccagctcttgggtaacttcctcaggaggatgcagagaatttggtctcttgactctctgcaggccttattgtttcagcctctggttctcttttcagcccagaaatcaaaggagcctggctttcctcagcctgttggcagggcaggtggggacagtatatatagaggctgccattctgcatgtcggttgtcactatgctagtttaacctgcctgtttccccatgcctagtgtttgaatgagtattaataaaatatccaacccagcccatttcttcctggaaaaaaa

SEQ ID NO: 44 - DNA, 3340 bp, Mus musculus
actgcgcggtgaaggggcgtggcctggccggggaggttgacacccagacgctgctctcagtcctctggcgcctgctccccagcgcattccttctgctcctgggatatttgtctcattactgccagttcttgcgcagcggtcactgggttcgtttcagcgtctgtggtttctgtcgctgttatccagtctccatcgccccagctcagcttcaggccttcttccgagactccacgggagagcccagagagcctccggagccgaagccatggaggaagtcccaccctactccctcagcagcaccctgttccagcaggaagaacagagtggggtgacctaccggatcccagccctgctgtaccttcctcccacccacaccttcctggcctttgcagagaagcggacctcagtcagagatgaggatgctgcctgcctggtgctcagacgagggctgatgaaggggcgctctgtacagtggggcccccaacggctactgatggaggccacattacctgggcatcgcaccatgaacccctgccctgtgtgggagaaaaatactggccgtgtgtacctgtttttcatctgtgtgcggggccatgttactgagaggtgccagattgtgtggggcaaaaatgccgcccgtctctgcttcctttgcagtgaagatgccggctgctcttggggtgaagtgaaagacttgaccgaggaggtcattggctcagaggtgaagcgctgggccacatttgctgtgggcccaggtcatggcatccagctacactcgggaaggctgatcatccccgcctatgcctactatgtctcacgttggtttctctgctttgcgtgttcagtcaagccccattccctgatgatctacagtgatgactttggagtcacatggcaccatggcaagttcattgagccccaggtgacaggggagtgccaagtggccgaagtggctgggacggctggtaaccctgtgctcactgcagtgcccgaacaccaagccgatttcgagcagaggcttttagtactgatagtggtggctgctttcagaagccaaccctgaacccacaactccatgagcctcgaaccggctgccaaggtagtgtagtgagcttccggcctttgaagatgccaaatacctatcaagactcaattggcaaaggtgctcccgctactcagaagtgccctctgctggacagtcctctggaggtggagaaaggagctgaaacaccatcagcaacatggctcttgtactcacatccaactagcaagaggaagaggattaacctaggcatctactacaaccggaaccccttggaggtgaactgctggtcccgcccgtggatcttgaaccgtgggcccagtggctactctgatctggctgttgtggaagaacaggacttggtggcgtgtttgtttgagtgtggggagaagaatgagtatgagcggattgacttctgtctgttttcagaccatgaggtcctgagctgtgaagactgtaccagccctagtagcgactaaagccaaatcaagacggatgagtgaggcccagcttcccacagaaaggaatggcagctacagccagggtaacagaggtctctgatgtctagagaaaactctaaaaactaataatctgctccttgaattttttcacttttcccttcaatgagcatggtgaaaattgtgccatatcttacataacgaggctcttgaactgggagtttgaatctcttctcttcccattaaaaggagaggccatgtgctcgcttcgcgttcgacaaagcctggattctgatcttgagtggaagccacaggcttgtcttttccaatggttcactgctcacctgagtattaggtgatgtgtaggtgccttggccagaagaaagatctgtgttgttgtatttttttaaatttatttatttactatatgtaagtacactgcagctgtcttcagacacaccagaagagggcgtcagatctcattagagatggttgtgagccaccatgtggttgctgggatttgaactcaggaccttcagaagagcagtcagtgctcttaactactgagccatctctcaagccccgcattgctgtatttttaataagaaaaatgcccttatccttccaataatgcctggagctgtacaaattctctgtcttagaagacttgagaaagcagaactgtaaggtcagatgctttctccagccttgatgctgtgttccaccttcccttcctcatccagaaaacagttactagggagaaaatgagaaacccatgccagctgcccttgatgatggttgataacggtgcttattgcttttgatgtcattacctctgttagagatgaatcagagtcagaggtccttagctgcatccacccatttccagggggacattctaacactgctgaacagtcagctaaaatgagagctgtgtgtcctagcctgattccaggttagtcatgatgcttcctggagctgggcttttatctaatcccaggagccatctaggggaggctcagagctagcaggtgatcttcctgagatggtttcaccgtgacaggtgaaccatgagcccttccaagcaaggccaaaggacaacattataggaaagatttctagtattaatatgccttttctctgtgtgtgtactgtcttgtagtgatgctatatagacaaatagatgatttcttattttttgtttgtttgtttgtttttttgtttttctgtagccctagctgtcctggaactcactttgtaaaccaggctggcctcgatctcagaaatccgcctgcctctgcctcccgagtgctgggattaaaggtgtgcaccaccacaccttaatgatgatcctataagtattcctaaaattatactagtaattattaactcctttataataggactgctattaaagccctcgctgatatgaaaactacagtgagaactctgccagtcttcacatgtcataattacttctgagatagaaagcaggcatttacaacttagaacacatttcttagagctgtaaaacaattaactagaggtcataaaagggaatgaaagatttattgtaggtgctaggacagaacataaaatattgactgggcttatctatatgaaacttcattgttaacttttacacaagaattatggtttttaactttcagtgaacctgcggagctagtgacagaagagaaatgtctagttagataactactcttaatggaaattcacataaacatctgttgccatcttctttttgaatttatgtttaaacttgtgaatgtttgaattagacactacgcgagcacatagaaaataaagaactaagcgtgaa

SEQ ID NO: 45 - DNA, 4608 bp, Mus musculus
ggacagtgtgcatcacggagcttgtggcccagactgtgcctggcagacccagaggacctaaggcttggctctagtggtggtcagcacagccctcggtggtctgcggagcctgatattgctttacgtaagggctgttctgctgtgcatctcctgtgtctgaagctattcgccatggagactgctggagctcccttctgcttccatgtggactccctggtaccttgctcctactggaaggttatggggcccacgcgtgttcccaggagaacggtgctcttccagagggaaaggacgggcctgacctaccgtgtgcctgcgttactctgtgtgcctcccaggcctactctgctggccttcgcggaacagcgacttagccctgatgactcccatgcccaccgcctggtgctacggaggggcacgctgaccaggggctcagtgcggtggggcactctgagtgtactggagactgcagtactggaggagcacaggtctatgaacccttgcccggtgctggatgagcactctggtaccatcttcctcttcttcattgccgtgctgggccacacaccggaggccgtgcaaatcgccactggcaagaacgctgctcgcctctgctgtgtgaccagctgtgacgctggcctcacctggggcagtgttcgagatctcactgaggaagccattggtgctgcattgcaggactgggccacctttgctgtgggtccgggccatggagttcagctgcgctcgggtcgcctgcttgttcctgcttacacctatcatgtggaccgacgggaatgttttggcaagatctgctggaccagtccccactccttggcattctacagtgatgatcatgggatctcctggcattgtggaggccttgtgcccaacctacgctctggagagtgccaactggctgcggtagatggagactttctctactgtaatgctcgaagccctctgggtaaccgtgtgcaggcactgagtgctgatgaaggcacgtccttcctaccaggggagctggtgcctacattggcagagacggctcgtggttgccagggtagcattgtgggcttcctagctccaccctcaatcgagcctcaggatgaccggtggacagggagtcctaggaacaccccacattccccatgcttcaatctcagagtacaggagtcttcgggggaaggtgccagaggtcttcttgaacgttggatgcccaggttgcctctctgctacccacagtcccggagcccagagaatcatggcctagagcctgggtcagatggagataagacatcctggactccggaatgtcctatgtcctctgattccatgcttcagagccccacatggctactatattcccacccagcagggcgtagagctcggctccacatgggaatctacctgagccgatcccccttggatccccacagctggacagagccctgggtgatctatgagggccccagtggctactctgaccttgcctttcttgggcctatgcctggggcatccctggtttttgcctgtctgtttgagagcgggaccaggacttcctatgaagacatttctttttgcttgttctcactggcggatgtcctggagaatgtgcccactggcttagagatgctaagtctcagggataaggctcaggggcattgctggccctcttgatggcctcaccctctcgtagccgcctggagaggaagggtagactatatagaggaggttaggggtaggtcagcatgatgctaggatggagagagctctgtcccctcgtggatggtggtggtgactcacccggggggccagctgctttctgagtgcaaatgagaaaaataaagagctgcgctgtgacttttctttccacatcaaagcttgggtgtcagtgctttagcttgatgctctgatcaccatgcaaatcttccaccggcgccttgctcagctttcatatcccaagggtgcctgggaggaaggcaacagggacagtggacatcactgcaccactttccacgaccctgtgtgccaacctcagccactttgaaacatgctgatgactgaggtctgttcactttcttaatttcaagcaggagaagcaggttggggagccagcctccccagctagaggggacagaacttgacttgagcaggggggtacctcctaggacctgctccatgtgcctacttctttacccttctctagagagggctcttgtcctgtcagagctgttttctcccttctcttgttttttctttttcaagactgtttctctgtgttagccctggctgtcctggatctcactctgtagatcaggctgaccttgagttcaaagctccatctgcctctacttctcacattactgtgattaaaggcatatactaccactgcctggtgcccttttgtatttcttattaaagtcctaatgtctgattataaaaacagtctgtgtgggctggagtgatggcttactcagtaaagcacttgccatggaatctgggcaatctgagtttcatttttagcatcctgtaaaaatcccaatttgatggtgtacttgtaatgtcagcatggagaggcagagataggtaagttccccaagactctttgaaccgacagcttggcctcactggcacattccaggtctcagtgagagaccctgcctcaaaatacaaagaaagagctgctgaagagtgggtcagagttgacctctgatctccggaagtatatgatacacacccgtgcatgcactcttccttacaaaataaaaagcaaaacaaaaccccaacaggtatatggccattttagaaaaattagaagatttagaaagctatacataaaaaaaaatgacctaaagaaaaatctttactgttctgggcactatccctatcaaaccactgtgttctttggccaagccttggggtggacactgttttgaggtgggtcctgttatctccactaggtagtggagttttgtgtcagactaactgggtcttaaagctgtctttaaggccatcaggagctactgacttgcctgcctcagcagagcatatcctgaaggtcggggttaagtctccttcccgagcgagttgccttccagtgggcccctggactcctaggtcctcagcgctcatcagctgccaaggactctgagggaatgtcctctgactgtggccccgaaaggtaggggagggggatgtgcttaggcttaggacagggtcctgtttcagtctgccttcactgttagtagcactgtgccacatggcacagactgggcgagctttaaaggaaggaggttgatattggttcccacttctggggatcatggttgagcagccttgtctgatgatggttgtcttgatggtagatcgtgaggtagttgatgaaggtatgacatggtgagaaactctgtgtgtgtgtgttattttctctgtgttctacctatacatctatctatgtatatatgtatctatctatctacctggaggctggagagatagcttagtggttaagaacatttgttgttcttgcatagtcctggatttaaattttcagcacccacatggcagctcacaacaacccataaatccagtttcagaggatccaacctctgatataccatgtcagccagagcagacacggctgaaggtggtttgatccccgtatggagaggtgacaattgggaagagagaaagatcaacttaaccatgcaaggaacaggaagttaaatactgaacagggaaggtaaaggcaggaagtagatgtagagggcaaatcaatgaaacccaaacatacccaaattacgctaaacacacactgacatgccaattaaaaggacaaattggctccactggcaaaaccaaaacagacactgaagatccaaacagtcacatgccaactaccgcggagggagacagacacagagaagaccgtgacagacacttggacactcttgagagtggatgtgcaggaagagagctctgccagtggagaagaaagcactcagaagaaagtgacagcagctgtaaatttgtattctgctaatgttatgttccaaagttgaaagcaaaattgtaccaattcataagaacaaacaggctgactctcagttgtgactgaacgtctctcagtaactgacggggcgagcaggccaaaggagagtcggctcagaagggtgcatagccacgccaaatcaaataagcaagtacaaccggcaggctctatttctagcacaaaggggtctgtgcctcattctgtgcttgggtcagagcttgggtctctcatttggatgtaagtggtgtagtggagaagcaggaaataatccggagcgcatattttgattttaacataagtgctgatttgggagggagttttgtcaaattgtgtttttacaatgtttttttttttttaaatgatgcttttttgtaaagtgtacaaatgtgatataagattggttctgctacattcagtttctataaaagtggttctaaaatattgtactgtcaatcatctcatgattattctactgtacacattactgactttgtatgtaataattaatattagaagaaaatataatttatttgaatataaaaaaaaaaaaaaaaaaa

SEQ ID NO: 46 - protein, 380 aa, Artificial Sequence
  Description of Artificial Sequence: Synthetic polypeptide
  MOD_RES (1)..(1): Any amino acid
  MOD_RES (6)..(6): Any amino acid
  MOD_RES (9)..(9): Any amino acid
  MOD_RES (62)..(62): Any amino acid
  MOD_RES (93)..(93): Any amino acid
  MOD_RES (187)..(187): Any amino acid
  MOD_RES (270)..(270): Any amino acid
  MOD_RES (301)..(302): Any amino acid
  MOD_RES (332)..(332): Any amino acid
  MOD_RES (363)..(363): Any amino acid
  MOD_RES (365)..(365): Any amino acid
XASLPXLQXESVFQSGAHAYRIPALLYLPGQQSLLAFAEQRASKKDEHAELIVLRRGDYDAXTHQVQWQAQEVVAQARLDGHRSMNPCPLYDXQTGTLFLFFIAIPGQVTEQQQLQTRANVTRLCQVTSTDHGRTWSSPRDLTDAAIGPAYREWSTFAVGPGHCLQLHDRARSLVVPAYAYRKLHPXQRPIPSAFCFLSHDHGRTWARGHFVAQDTLECQVAEVETGEQRVVTLNARSHLRARVQAQSTNDGLDFQESQLVKKLVEPPPXGCQGSVISFPSPRSGPGSPAQWLLYTHPTHXXQRADLGAYLNPRPPAPEAWSEPVLLAKGSXAYSDLQSMGTGPDGSPLFGCLYEANDYEEIXFXMFTLKQAFPAEYLPQ

SEQ ID NO: 47 - protein, 380 aa, Artificial Sequence
  Description of Artificial Sequence: Synthetic polypeptide
  MOD_RES (1)..(2): Any amino acid
  MOD_RES (4)..(6): Any amino acid
  MOD_RES (9)..(9): Any amino acid
  MOD_RES (44)..(45): Any amino acid
  MOD_RES (54)..(54): Any amino acid
  MOD_RES (62)..(62): Any amino acid
  MOD_RES (69)..(69): Any amino acid
  MOD_RES (78)..(78): Any amino acid
  MOD_RES (93)..(93): Any amino acid
  MOD_RES (107)..(108): Any amino acid
  MOD_RES (112)..(112): Any amino acid
  MOD_RES (125)..(126): Any amino acid
  MOD_RES (150)..(150): Any amino acid
  MOD_RES (164)..(164): Any amino acid
  MOD_RES (171)..(171): Any amino acid
  MOD_RES (187)..(187): Any amino acid
  MOD_RES (196)..(196): Any amino acid
  MOD_RES (217)..(217): Any amino acid
  MOD_RES (249)..(249): Any amino acid
  MOD_RES (251)..(251): Any amino acid
  MOD_RES (257)..(257): Any amino acid
  MOD_RES (270)..(270): Any amino acid
  MOD_RES (272)..(272): Any amino acid
  MOD_RES (292)..(292): Any amino acid
  MOD_RES (301)..(302): Any amino acid
  MOD_RES (325)..(325): Any amino acid
  MOD_RES (332)..(332): Any amino acid
  MOD_RES (352)..(352): Any amino acid
  MOD_RES (363)..(363): Any amino acid
  MOD_RES (365)..(365): Any amino acid
XXSXXXLQXESVFQSGAHAYRIPALLYLPGQQSLLAFAEQRASXXDEHAELIVXRRGDYDAXTHQVQWXAQEVVAQAXLDGHRSMNPCPLYDXQTGTLFLFFIAIPXXVTEXQQLQTRANVTRLXXVTSTDHGRTWSSPRDLTDAAIGPXYREWSTFAVGPGHXLQLHDRXRSLVVPAYAYRKLHPXQRPIPSAFXFLSHDHGRTWARGHFVAQDTXECQVAEVETGEQRVVTLNARSHLRARVQAQSXNXGLDFQXSQLVKKLVEPPPXGXQGSVISFPSPRSGPGSPAQXLLYTHPTHXXQRADLGAYLNPRPPAPEAWSEPXLLAKGSXAYSDLQSMGTGPDGSPLFGXLYEANDYEEIXFXMFTLKQAFPAEYLPQ

SEQ ID NO: 48 - protein, 380 aa, Artificial Sequence
  Description of Artificial Sequence: Synthetic polypeptide
DASLPYLQKESVFQSGAHAYRIPALLYLPGQQSLLAFAEQRASKKDEHAELIVLRRGDYDAGTHQVQWQAQEVVAQARLDGHRSMNPCPLYDEQTGTLFLFFIAIPGQVTEQQQLQTRANVTRLCQVTSTDHGRTWSSPRDLTDAAIGPAYREWSTFAVGPGHCLQLHDRARSLVVPAYAYRKLHPKQRPIPSAFCFLSHDHGRTWARGHFVAQDTLECQVAEVETGEQRVVTLNARSHLRARVQAQSTNDGLDFQESQLVKKLVEPPPQGCQGSVISFPSPRSGPGSPAQWLLYTHPTHSWQRADLGAYLNPRPPAPEAWSEPVLLAKGSAAYSDLQSMGTGPDGSPLFGCLYEANDYEEIVFLMFTLKQAFPAEYLPQ

SEQ ID NO: 49 - protein, 380 aa, Artificial Sequence
  Description of Artificial Sequence: Synthetic polypeptide
DASLPYLQDESVFQSGAHAYRIPALLYLPGQQSLLAFAEQRASKKDEHAELIVLRRGDYDAPTHQVQWQAQEVVAQARLDGHRSMNPCPLYDEQTGTLFLFFIAIPGQVTEQQQLQTRANVTRLCQVTSTDHGRTWSSPRDLTDAAIGPAYREWSTFAVGPGHCLQLHDRARSLVVPAYAYRKLHPKQRPIPSAFCFLSHDHGRTWARGHFVAQDTLECQVAEVETGEQRVVTLNARSHLRARVQAQSTNDGLDFQESQLVKKLVEPPPQGCQGSVISFPSPRSGPGSPAQWLLYTHPTHSWQRADLGAYLNPRPPAPEAWSEPVLLAKGSAAYSDLQSMGTGPDGSPLFGCLYEANDYEEIRFIMFTLKQAFPAEYLPQ

SEQ ID NO: 50 - protein, 380 aa, Artificial Sequence
  Description of Artificial Sequence: Synthetic polypeptide
DASLPYLQKESVFQSGAHAYRIPALLYLPGQQSLLAFAEQRASKKDEHAELIVLRRGDYDANTHQVQWQAQEVVAQARLDGHRSMNPCPLYDAQTGTLFLFFIAIPGQVTEQQQLQTRANVTRLCQVTSTDHGRTWSSPRDLTDAAIGPAYREWSTFAVGPGHCLQLHDRARSLVVPAYAYRKLHPKQRPIPSAFCFLSHDHGRTWARGHFVAQDTLECQVAEVETGEQRVVTLNARSHLRARVQAQSTNDGLDFQESQLVKKLVEPPPQGCQGSVISFPSPRSGPGSPAQWLLYTHPTHSWQRADLGAYLNPRPPAPEAWSEPVLLAKGSAAYSDLQSMGTGPDGSPLFGCLYEANDYEEIVFLMFTLKQAFPAEYLPQ

SEQ ID NO: 51 - protein, 380 aa, Artificial Sequence
  Description of Artificial Sequence: Synthetic polypeptide
DASLPYLQKESVFQSGAHAYRIPALLYLPGQQSLLAFAEQRASKKDEHAELIVLRRGDYDAPTHQVQWQAQEVVAQARLDGHRSMNPCPLYDAQTGTLFLFFIAIPGQVTEQQQLQTRANVTRLCQVTSTDHGRTWSSPRDLTDAAIGPAYREWSTFAVGPGHCLQLHDRARSLVVPAYAYRKLHPKQRPIPSAFCFLSHDHGRTWARGHFVAQDTLECQVAEVETGEQRVVTLNARSHLRARVQAQSTNDGLDFQESQLVKKLVEPPPAGCQGSVISFPSPRSGPGSPAQWLLYTHPTHRKQRADLGAYLNPRPPAPEAWSEPVLLAKGSAAYSDLQSMGTGPDGSPLFGCLYEANDYEEIVFLMFTLKQAFPAEYLPQ

SEQ ID NO: 52 - protein, 380 aa, Artificial Sequence
  Description of Artificial Sequence: Synthetic polypeptide
DASLPYLQKESVFQSGAHAYRIPALLYLPGQQSLLAFAEQRASKKDEHAELIVLRRGDYDASTHQVQWQAQEVVAQARLDGHRSMNPCPLYDAQTGTLFLFFIAIPGQVTEQQQLQTRANVTRLCQVTSTDHGRTWSSPRDLTDAAIGPAYREWSTFAVGPGHCLQLHDRARSLVVPAYAYRKLHPKQRPIPSAFCFLSHDHGRTWARGHFVAQDTLECQVAEVETGEQRVVTLNARSHLRARVQAQSTNDGLDFQESQLVKKLVEPPPAGCQGSVISFPSPRSGPGSPAQWLLYTHPTHRKQRADLGAYLNPRPPAPEAWSEPVLLAKGSAAYSDLQSMGTGPDGSPLFGCLYEANDYEEIVFLMFTLKQAFPAEYLPQ

SEQ ID NO: 53 - protein, 380 aa, Artificial Sequence
  Description of Artificial Sequence: Synthetic polypeptide
DASLPYLQKESVFQSGAHAYRIPALLYLPGQQSLLAFAEQRASKKDEHAELIVLRRGDYDATTHQVQWQAQEVVAQARLDGHRSMNPCPLYDAQTGTLFLFFIAIPGQVTEQQQLQTRANVTRLCQVTSTDHGRTWSSPRDLTDAAIGPAYREWSTFAVGPGHCLQLHDRARSLVVPAYAYRKLHPKQRPIPSAFCFLSHDHGRTWARGHFVAQDTLECQVAEVETGEQRVVTLNARSHLRARVQAQSTNDGLDFQESQLVKKLVEPPPAGCQGSVISFPSPRSGPGSPAQWLLYTHPTHRKQRADLGAYLNPRPPAPEAWSEPVLLAKGSAAYSDLQSMGTGPDGSPLFGCLYEANDYEEIVFLMFTLKQAFPAEYLPQ

SEQ ID NO: 54 - protein, 380 aa, Artificial Sequence
  Description of Artificial Sequence: Synthetic polypeptide
DASLPYLQKESVFQSGAHAYRIPALLYLPGQQSLLAFAEQRASKKDEHAELIVLRRGDYDANTHQVQWQAQEVVAQARLDGHRSMNPCPLYDAQTGTLFLFFIAIPGQVTEQQQLQTRANVTRLCQVTSTDHGRTWSSPRDLTDAAIGPAYREWSTFAVGPGHCLQLHDRARSLVVPAYAYRKLHPKQRPIPSAFCFLSHDHGRTWARGHFVAQDTLECQVAEVETGEQRVVTLNARSHLRARVQAQSTNDGLDFQESQLVKKLVEPPPAGCQGSVISFPSPRSGPGSPAQWLLYTHPTHRKQRADLGAYLNPRPPAPEAWSEPVLLAKGSAAYSDLQSMGTGPDGSPLFGCLYEANDYEEIVFLMFTLKQAFPAEYLPQ

SEQ ID NO: 55 - protein, 379 aa, Artificial Sequence
  Description of Artificial Sequence: Synthetic polypeptide
ASLPYLQKESVFQSGAHAYRIPALLYLPGQQSLLAFAEQRASKKDEHAELIVLRRGDYDAPTHQVQWQAQEVVAQARLDGHRSMNPCPLYDAQTGTLFLFFIAIPGQVTEQQQLQTRANVTRLCQVTSTDHGRTWSSPRDLTDAAIGPAYREWSTFAVGPGHCLQLHDRARSLVVPAYAYRKLHPKQRPIPSAFCFLSHDHGRTWARGHFVAQDTLECQVAEVETGEQRVVTLNARSHLRARVQAQSTNDGLDFQESQLVKKLVEPPPQGCQGSVISFPSPRSGPGSPAQWLLYTHPTHSWQRADLGAYLNPRPPAPEAWSEPVLLAKGSCAYSDLQSMGTGPDGSPLFGCLYEANDYEEIVFLMFTLKQAFPAEYLPQ

SEQ ID NO: 56 - protein, 380 aa, Artificial Sequence
  Description of Artificial Sequence: Synthetic polypeptide
MASLPYLQKESVFQSGAHAYRIPALLYLPGQQSLLAFAEQRASKKDEHAELIVLRRGDYDAPTHQVQWQAQEVVAQARLDGHRSMNPCPLYDAQTGTLFLFFIAIPGQVTEQQQLQTRANVTRLCQVTSTDHGRTWSSPRDLTDAAIGPAYREWSTFAVGPGHCLQLHDRARSLVVPAYAYRKLHPKQRPIPSAFCFLSHDHGRTWARGHFVAQDTLECQVAEVETGEQRVVTLNARSHLRARVQAQSTNDGLDFQESQLVKKLVEPPPQGCQGSVISFPSPRSGPGSPAQWLLYTHPTHSWQRADLGAYLNPRPPAPEAWSEPVLLAKGSCAYSDLQSMGTGPDGSPLFGCLYEANDYEEIVFLMFTLKQAFPAEYLPQ

SEQ ID NO: 57 - protein, 379 aa, Artificial Sequence
  Description of Artificial Sequence: Synthetic polypeptide
ASLPYLQKESVFQSGAHAYRIPALLYLPGQQSLLAFAEQRASKKDEHAELIVLRRGDYDAPTHQVQWQAQEVVAQARLDGHRSMNPCPLYDAQTGTLFLFFIAIPGQVTEQQQLQTRANVTRLCQVTSTDHGRTWSSPRDLTDAAIGPAYREWSTFAVGPGHCLQLHDRARSLVVPAYAYRKLHPKQRPIPSAFCFLSHDHGRTWARGHFVAQDTLECQVAEVETGEQRVVTLNARSHLRARVQAQSTNDGLDFQESQLVKKLVEPPPQGCQGSVISFPSPRSGPGSPAQWLLYTHPTHSWQRADLGAYLNPRPPAPEAWSEPVLLAKGSAAYSDLQSMGTGPDGSPLFGCLYEANDYEEIVFLMFTLKQAFPAEYLPQ

SEQ ID NO: 58 - protein, 380 aa, Artificial Sequence
  Description of Artificial Sequence: Synthetic polypeptide
DASLPYLQKESVFQSGAHAYRIPALLYLPGQQSLLAFAEQRASKKDEHAELIVLRRGDYDAPTHQVQWQAQEVVAQARLDGHRSMNPCPLYDAQTGTLFLFFIAIPGQVTEQQQLQTRANVTRLCQVTSTDHGRTWSSPRDLTDAAIGPAYREWSTFAVGPGHCLQLHDRARSLVVPAYAYRKLHPKQRPIPSAFCFLSHDHGRTWARGHFVAQDTLECQVAEVETGEQRVVTLNARSHLRARVQAQSTNDGLDFQESQLVKKLVEPPPQGCQGSVISFPSPRSGPGSPAQWLLYTHPTHSWQRADLGAYLNPRPPAPEAWSEPVLLAKGSAAYSDLQSMGTGPDGSPLFGCLYEANDYEEIVFLMFTLKQAFPAEYLPQ

SEQ ID NO: 59 - protein, 380 aa, Artificial Sequence
  Description of Artificial Sequence: Synthetic polypeptide
DASLPYLQKESVFQSGAHAYRIPALLYLPGQQSLLAFAEQRASKKDEHAELIVLRRGDYDAPTHQVQWQAQEVVAQARLDGHRSMNPCPLYDAQTGTLFLFFIAIPGQVTEQQQLQTRANVTRLCQVTSTDHGRTWSSPRDLTDAAIGPAYREWSTFAVGPGHCLQLHDRARSLVVPAYAYRKLHPKQRPIPSAFCFLSHDHGRTWARGHFVAQDTLECQVAEVETGEQRVVTLNARSHLRARVQAQSTNDGLDFQESQLVKKLVEPPPQGCQGSVISFPSPRSGPGSPAQWLLYTHPTHSWQRADLGAYLNPRPPAPEAWSEPVLLAKGSCAYSDLQSMGTGPDGSPLFGCLYEANDYEEIVFLMFTLKQAFPAEYLPQ

SEQ ID NO: 60 - protein, 380 aa, Artificial Sequence
  Description of Artificial Sequence: Synthetic polypeptide
AASLPYLQKESVFQSGAHAYRIPALLYLPGQQSLLAFAEQRASKKDEHAELIVLRRGDYDAPTHQVQWQAQEVVAQARLDGHRSMNPCPLYDAQTGTLFLFFIAIPGQVTEQQQLQTRANVTRLCQVTSTDHGRTWSSPRDLTDAAIGPAYREWSTFAVGPGHCLQLHDRARSLVVPAYAYRKLHPKQRPIPSAFCFLSHDHGRTWARGHFVAQDTLECQVAEVETGEQRVVTLNARSHLRARVQAQSTNDGLDFQESQLVKKLVEPPPQGCQGSVISFPSPRSGPGSPAQWLLYTHPTHSWQRADLGAYLNPRPPAPEAWSEPVLLAKGSAAYSDLQSMGTGPDGSPLFGCLYEANDYEEIVFLMFTLKQAFPAEYLPQ

SEQ ID NO: 61 - protein, 380 aa, Artificial Sequence
  Description of Artificial Sequence: Synthetic polypeptide
MASLPYLQKESVFQSGAHAYRIPALLYLPGQQSLLAFAEQRASKKDEHAELIVLRRGDYDAPTHQVQWQAQEVVAQARLDGHRSMNPCPLYDAQTGTLFLFFIAIPGQVTEQQQLQTRANVTRLCQVTSTDHGRTWSSPRDLTDAAIGPAYREWSTFAVGPGHCLQLHDRARSLVVPAYAYRKLHPKQRPIPSAFCFLSHDHGRTWARGHFVAQDTLECQVAEVETGEQRVVTLNARSHLRARVQAQSTNDGLDFQESQLVKKLVEPPPQGCQGSVISFPSPRSGPGSPAQWLLYTHPTHSWQRADLGAYLNPRPPAPEAWSEPVLLAKGSAAYSDLQSMGTGPDGSPLFGCLYEANDYEEIVFLMFTLKQAFPAEYLPQ

SEQ ID NO: 62 - protein, 380 aa, Artificial Sequence
  Description of Artificial Sequence: Synthetic polypeptide
AASLPYLQKESVFQSGAHAYRIPALLYLPGQQSLLAFAEQRASKKDEHAELIVLRRGDYDAPTHQVQWQAQEVVAQARLDGHRSMNPCPLYDAQTGTLFLFFIAIPGQVTEQQQLQTRANVTRLCQVTSTDHGRTWSSPRDLTDAAIGPAYREWSTFAVGPGHCLQLHDRARSLVVPAYAYRKLHPKQRPIPSAFCFLSHDHGRTWARGHFVAQDTLECQVAEVETGEQRVVTLNARSHLRARVQAQSTNDGLDFQESQLVKKLVEPPPQGCQGSVISFPSPRSGPGSPAQWLLYTHPTHSWQRADLGAYLNPRPPAPEAWSEPVLLAKGSCAYSDLQSMGTGPDGSPLFGCLYEANDYEEIVFLMFTLKQAFPAEYLPQ

SEQ ID NO: 63 - protein, 450 aa, Artificial Sequence
  Description of Artificial Sequence: Synthetic polypeptide
EVQLVESGGGLVQPGGSLRLSCAASGFNIKDTYIHWVRQAPGKGLEWVARIYPTNGYTRYADSVKGRFTISADTSKNTAYLQMNSLRAEDTAVYYCSRWGGDGFYAMDYWGQGTLVTVSSASTKGPSVFPLAPSSKSTSGGTAALGCLVKDYFPEPVTVSWNSGALTSGVHTFPAVLQSSGLYSLSSVVTVPSSSLGTQTYICNVNHKPSNTKVDKKVEPKSCDKTHTCPPCPAPELLGGPSVFLFPPKPKDTLMISRTPEVTCVVVDVSHEDPEVKFNWYVDGVEVHNAKTKPREEQYNSTYRVVSVLTVLHQDWLNGKEYKCKVSNKALPAPIEKTISKAKGQPREPQVYTLPPSREEMTKNQVSLYCLVKGFYPSDIAVEWESNGQPENNYKTTPPVLDSDGSFFLYSKLTVDKSRWQQGNVFSCSVMHEALHNHYTQKSLSLSPGK

SEQ ID NO: 64 - protein, 214 aa, Artificial Sequence
  Description of Artificial Sequence: Synthetic polypeptide
DIQMTQSPSSLSASVGDRVTITCRASQDVNTAVAWYQQKPGKAPKLLIYSASFLYSGVPSRFSGSRSGTDFTLTISSLQPEDFATYYCQQHYTTPPTFGQGTKVEIKRTVAAPSVFIFPPSDEQLKSGTASVVCLLNNFYPREAKVQWKVDNALQSGNSQESVTEQDSKDSTYSLSSTLTLSKADYEKHKVYACEVTHQGLSSPVTKSFNRGEC

SEQ ID NO: 65 - protein, 242 aa, Artificial Sequence
  Description of Artificial Sequence: Synthetic polypeptide
EVQLVESGGGLVQPGGSLRLSCAASGFNIKDTYIHWVRQAPGKGLEWVARIYPTNGYTRYADSVKGRFTISADTSKNTAYLQMNSLRAEDTAVYYCSRWGGDGFYAMDYWGQGTLVTVSSGGGGSGGGGSGGGGSDIQMTQSPSSLSASVGDRVTITCRASQDVNTAVAWYQQKPGKAPKLLIYSASFLYSGVPSRFSGSRSGTDFTLTISSLQPEDFATYYCQQHYTTPPTFGQGTKVEIK

SEQ ID NO: 66 - protein, 214 aa, Artificial Sequence; identical to SEQ ID NO: 64
  Description of Artificial Sequence: Synthetic polypeptide

SEQ ID NO: 67 - protein, 450 aa, Artificial Sequence; identical to SEQ ID NO: 63
  Description of Artificial Sequence: Synthetic polypeptide

SEQ ID NO: 68 - protein, 617 aa, Artificial Sequence
  Description of Artificial Sequence: Synthetic polypeptide
DASLPYLQKESVFQSGAHAYRIPALLYLPGQQSLLAFAEQRASKKDEHAELIVLRRGDYDAGTHQVQWQAQEVVAQARLDGHRSMNPCPLYDEQTGTLFLFFIAIPGQVTEQQQLQTRANVTRLCQVTSTDHGRTWSSPRDLTDAAIGPAYREWSTFAVGPGHCLQLHDRARSLVVPAYAYRKLHPKQRPIPSAFCFLSHDHGRTWARGHFVAQDTLECQVAEVETGEQRVVTLNARSHLRARVQAQSTNDGLDFQESQLVKKLVEPPPQGCQGSVISFPSPRSGPGSPAQWLLYTHPTHSWQRADLGAYLNPRPPAPEAWSEPVLLAKGSAAYSDLQSMGTGPDGSPLFGCLYEANDYEEIVFLMFTLKQAFPAEYLPQGGGGSGGGGSDKTHTCPPCPAPELLGGPSVFLFPPKPKDTLMISRTPEVTCVVVDVSHEDPEVKFNWYVDGVEVHNAKTKPREEQYNSTYRVVSVLTVLHQDWLNGKEYKCKVSNKALPAPIEKTISKAKGQPREPQVYTLPPSREEMTKNQVSLTCLVKGFYPSDIAVEWESNGQPENNYKTTPPVLDSDGSFFLTSKLTVDKSRWQQGNVFSCSVMHEALHNHYTQKSLSLSPGK

SEQ ID NO: 69 - protein, 617 aa, Artificial Sequence
  Description of Artificial Sequence: Synthetic polypeptide
DASLPYLQDESVFQSGAHAYRIPALLYLPGQQSLLAFAEQRASKKDEHAELIVLRRGDYDAPTHQVQWQAQEVVAQARLDGHRSMNPCPLYDEQTGTLFLFFIAIPGQVTEQQQLQTRANVTRLCQVTSTDHGRTWSSPRDLTDAAIGPAYREWSTFAVGPGHCLQLHDRARSLVVPAYAYRKLHPKQRPIPSAFCFLSHDHGRTWARGHFVAQDTLECQVAEVETGEQRVVTLNARSHLRARVQAQSTNDGLDFQESQLVKKLVEPPPQGCQGSVISFPSPRSGPGSPAQWLLYTHPTHSWQRADLGAYLNPRPPAPEAWSEPVLLAKGSAAYSDLQSMGTGPDGSPLFGCLYEANDYEEIRFIMFTLKQAFPAEYLPQGGGGSGGGGSDKTHTCPPCPAPELLGGPSVFLFPPKPKDTLMISRTPEVTCVVVDVSHEDPEVKFNWYVDGVEVHNAKTKPREEQYNSTYRVVSVLTVLHQDWLNGKEYKCKVSNKALPAPIEKTISKAKGQPREPQVYTLPPSREEMTKNQVSLTCLVKGFYPSDIAVEWESNGQPENNYKTTPPVLDSDGSFFLTSKLTVDKSRWQQGNVFSCSVMHEALHNHYTQKSLSLSPGK

SEQ ID NO: 70 - protein, 617 aa, Artificial Sequence
  Description of Artificial Sequence: Synthetic polypeptide
DASLPYLQKESVFQSGAHAYRIPALLYLPGQQSLLAFAEQRASKKDEHAELIVLRRGDYDANTHQVQWQAQEVVAQARLDGHRSMNPCPLYDAQTGTLFLFFIAIPGQVTEQQQLQTRANVTRLCQVTSTDHGRTWSSPRDLTDAAIGPAYREWSTFAVGPGHCLQLHDRARSLVVPAYAYRKLHPKQRPIPSAFCFLSHDHGRTWARGHFVAQDTLECQVAEVETGEQRVVTLNARSHLRARVQAQSTNDGLDFQESQLVKKLVEPPPQGCQGSVISFPSPRSGPGSPAQWLLYTHPTHSWQRADLGAYLNPRPPAPEAWSEPVLLAKGSAAYSDLQSMGTGPDGSPLFGCLYEANDYEEIVFLMFTLKQAFPAEYLPQGGGGSGGGGSDKTHTCPPCPAPELLGGPSVFLFPPKPKDTLMISRTPEVTCVVVDVSHEDPEVKFNWYVDGVEVHNAKTKPREEQYNSTYRVVSVLTVLHQDWLNGKEYKCKVSNKALPAPIEKTISKAKGQPREPQVYTLPPSREEMTKNQVSLTCLVKGFYPSDIAVEWESNGQPENNYKTTPPVLDSDGSFFLTSKLTVDKSRWQQGNVFSCSVMHEALHNHYTQKSLSLSPGK

SEQ ID NO: 71 - protein, 617 aa, Artificial Sequence
  Description of Artificial Sequence: Synthetic polypeptide
DASLPYLQKESVFQSGAHAYRIPALLYLPGQQSLLAFAEQRASKKDEHAELIVLRRGDYDAPTHQVQWQAQEVVAQARLDGHRSMNPCPLYDAQTGTLFLFFIAIPGQVTEQQQLQTRANVTRLCQVTSTDHGRTWSSPRDLTDAAIGPAYREWSTFAVGPGHCLQLHDRARSLVVPAYAYRKLHPKQRPIPSAFCFLSHDHGRTWARGHFVAQDTLECQVAEVETGEQRVVTLNARSHLRARVQAQSTNDGLDFQESQLVKKLVEPPPAGCQGSVISFPSPRSGPGSPAQWLLYTHPTHRKQRADLGAYLNPRPPAPEAWSEPVLLAKGSAAYSDLQSMGTGPDGSPLFGCLYEANDYEEIVFLMFTLKQAFPAEYLPQGGGGSGGGGSDKTHTCPPCPAPELLGGPSVFLFPPKPKDTLMISRTPEVTCVVVDVSHEDPEVKFNWYVDGVEVHNAKTKPREEQYNSTYRVVSVLTVLHQDWLNGKEYKCKVSNKALPAPIEKTISKAKGQPREPQVYTLPPSREEMTKNQVSLTCLVKGFYPSDIAVEWESNGQPENNYKTTPPVLDSDGSFFLTSKLTVDKSRWQQGNVFSCSVMHEALHNHYTQKSLSLSPGK

SEQ ID NO: 72 - protein, 617 aa, Artificial Sequence
  Description of Artificial Sequence: Synthetic polypeptide
DASLPYLQKESVFQSGAHAYRIPALLYLPGQQSLLAFAEQRASKKDEHAELIVLRRGDYDASTHQVQWQAQEVVAQARLDGHRSMNPCPLYDAQTGTLFLFFIAIPGQVTEQQQLQTRANVTRLCQVTSTDHGRTWSSPRDLTDAAIGPAYREWSTFAVGPGHCLQLHDRARSLVVPAYAYRKLHPKQRPIPSAFCFLSHDHGRTWARGHFVAQDTLECQVAEVETGEQRVVTLNARSHLRARVQAQSTNDGLDFQESQLVKKLVEPPPAGCQGSVISFPSPRSGPGSPAQWLLYTHPTHRKQRADLGAYLNPRPPAPEAWSEPVLLAKGSAAYSDLQSMGTGPDGSPLFGCLYEANDYEEIVFLMFTLKQAFPAEYLPQGGGGSGGGGSDKTHTCPPCPAPELLGGPSVFLFPPKPKDTLMISRTPEVTCVVVDVSHEDPEVKFNWYVDGVEVHNAKTKPREEQYNSTYRVVSVLTVLHQDWLNGKEYKCKVSNKALPAPIEKTISKAKGQPREPQVYTLPPSREEMTKNQVSLTCLVKGFYPSDIAVEWESNGQPENNYKTTPPVLDSDGSFFLTSKLTVDKSRWQQGNVFSCSVMHEALHNHYTQKSLSLSPGK

SEQ ID NO: 73 - protein, 617 aa, Artificial Sequence
  Description of Artificial Sequence: Synthetic polypeptide
DASLPYLQKESVFQSGAHAYRIPALLYLPGQQSLLAFAEQRASKKDEHAELIVLRRGDYDATTHQVQWQAQEVVAQARLDGHRSMNPCPLYDAQTGTLFLFFIAIPGQVTEQQQLQTRANVTRLCQVTSTDHGRTWSSPRDLTDAAIGPAYREWSTFAVGPGHCLQLHDRARSLVVPAYAYRKLHPKQRPIPSAFCFLSHDHGRTWARGHFVAQDTLECQVAEVETGEQRVVTLNARSHLRARVQAQSTNDGLDFQESQLVKKLVEPPPAGCQGSVISFPSPRSGPGSPAQWLLYTHPTHRKQRADLGAYLNPRPPAPEAWSEPVLLAKGSAAYSDLQSMGTGPDGSPLFGCLYEANDYEEIVFLMFTLKQAFPAEYLPQGGGGSGGGGSDKTHTCPPCPAPELLGGPSVFLFPPKPKDTLMISRTPEVTCVVVDVSHEDPEVKFNWYVDGVEVHNAKTKPREEQYNSTYRVVSVLTVLHQDWLNGKEYKCKVSNKALPAPIEKTISKAKGQPREPQVYTLPPSREEMTKNQVSLTCLVKGFYPSDIAVEWESNGQPENNYKTTPPVLDSDGSFFLTSKLTVDKSRWQQGNVFSCSVMHEALHNHYTQKSLSLSPGK

SEQ ID NO: 74 - protein, 617 aa, Artificial Sequence
  Description of Artificial Sequence: Synthetic polypeptide
DASLPYLQKESVFQSGAHAYRIPALLYLPGQQSLLAFAEQRASKKDEHAELIVLRRGDYDANTHQVQWQAQEVVAQARLDGHRSMNPCPLYDAQTGTLFLFFIAIPGQVTEQQQLQTRANVTRLCQVTSTDHGRTWSSPRDLTDAAIGPAYREWSTFAVGPGHCLQLHDRARSLVVPAYAYRKLHPKQRPIPSAFCFLSHDHGRTWARGHFVAQDTLECQVAEVETGEQRVVTLNARSHLRARVQAQSTNDGLDFQESQLVKKLVEPPPAGCQGSVISFPSPRSGPGSPAQWLLYTHPTHRKQRADLGAYLNPRPPAPEAWSEPVLLAKGSAAYSDLQSMGTGPDGSPLFGCLYEANDYEEIVFLMFTLKQAFPAEYLPQGGGGSGGGGSDKTHTCPPCPAPELLGGPSVFLFPPKPKDTLMISRTPEVTCVVVDVSHEDPEVKFNWYVDGVEVHNAKTKPREEQYNSTYRVVSVLTVLHQDWLNGKEYKCKVSNKALPAPIEKTISKAKGQPREPQVYTLPPSREEMTKNQVSLTCLVKGFYPSDIAVEWESNGQPENNYKTTPPVLDSDGSFFLTSKLTVDKSRWQQGNVFSCSVMHEALHNHYTQKSLSLSPGK

SEQ ID NO: 75 - protein, 617 aa, Artificial Sequence
  Description of Artificial Sequence: Synthetic polypeptide
  MOD_RES (1)..(1): Any amino acid
  MOD_RES (6)..(6): Any amino acid
  MOD_RES (9)..(9): Any amino acid
  MOD_RES (62)..(62): Any amino acid
  MOD_RES (93)..(93): Any amino acid
  MOD_RES (187)..(187): Any amino acid
  MOD_RES (270)..(270): Any amino acid
  MOD_RES (301)..(302): Any amino acid
  MOD_RES (332)..(332): Any amino acid
  MOD_RES (363)..(363): Any amino acid
  MOD_RES (365)..(365): Any amino acid
XASLPXLQXESVFQSGAHAYRIPALLYLPGQQSLLAFAEQRASKKDEHAELIVLRRGDYDAXTHQVQWQAQEVVAQARLDGHRSMNPCPLYDXQTGTLFLFFIAIPGQVTEQQQLQTRANVTRLCQVTSTDHGRTWSSPRDLTDAAIGPAYREWSTFAVGPGHCLQLHDRARSLVVPAYAYRKLHPXQRPIPSAFCFLSHDHGRTWARGHFVAQDTLECQVAEVETGEQRVVTLNARSHLRARVQAQSTNDGLDFQESQLVKKLVEPPPXGCQGSVISFPSPRSGPGSPAQWLLYTHPTHXXQRADLGAYLNPRPPAPEAWSEPVLLAKGSXAYSDLQSMGTGPDGSPLFGCLYEANDYEEIXFXMFTLKQAFPAEYLPQGGGGSGGGGSDKTHTCPPCPAPELLGGPSVFLFPPKPKDTLMISRTPEVTCVVVDVSHEDPEVKFNWYVDGVEVHNAKTKPREEQYNSTYRVVSVLTVLHQDWLNGKEYKCKVSNKALPAPIEKTISKAKGQPREPQVYTLPPSREEMTKNQVSLTCLVKGFYPSDIAVEWESNGQPENNYKTTPPVLDSDGSFFLTSKLTVDKSRWQQGNVFSCSVMHEALHNHYTQKSLSLSPGK

SEQ ID NO: 76 - protein, 617 aa, Artificial Sequence
  Description of Artificial Sequence: Synthetic polypeptide
  MOD_RES (1)..(2): Any amino acid
  MOD_RES (4)..(6): Any amino acid
  MOD_RES (9)..(9): Any amino acid
  MOD_RES (44)..(45): Any amino acid
  MOD_RES (54)..(54): Any amino acid
  MOD_RES (62)..(62): Any amino acid
  MOD_RES (69)..(69): Any amino acid
  MOD_RES (78)..(78): Any amino acid
  MOD_RES (93)..(93): Any amino acid
  MOD_RES (107)..(108): Any amino acid
  MOD_RES (112)..(112): Any amino acid
  MOD_RES (125)..(126): Any amino acid
  MOD_RES (150)..(150): Any amino acid
  MOD_RES (164)..(164): Any amino acid
  MOD_RES (171)..(171): Any amino acid
  MOD_RES (187)..(187): Any amino acid
  MOD_RES (196)..(196): Any amino acid
  MOD_RES (217)..(217): Any amino acid
  MOD_RES (249)..(249): Any amino acid
  MOD_RES (251)..(251): Any amino acid
  MOD_RES (257)..(257): Any amino acid
  MOD_RES (270)..(270): Any amino acid
  MOD_RES (272)..(272): Any amino acid
  MOD_RES (292)..(292): Any amino acid
  MOD_RES (301)..(302): Any amino acid
  MOD_RES (325)..(325): Any amino acid
  MOD_RES (332)..(332): Any amino acid
  MOD_RES (352)..(352): Any amino acid
  MOD_RES (363)..(363): Any amino acid
  MOD_RES (365)..(365): Any amino acid
XXSXXXLQXESVFQSGAHAYRIPALLYLPGQQSLLAFAEQRASXXDEHAELIVXRRGDYDAXTHQVQWXAQEVVAQAXLDGHRSMNPCPLYDXQTGTLFLFFIAIPXXVTEXQQLQTRANVTRLXXVTSTDHGRTWSSPRDLTDAAIGPXYREWSTFAVGPGHXLQLHDRXRSLVVPAYAYRKLHPXQRPIPSAFXFLSHDHGRTWARGHFVAQDTXECQVAEVETGEQRVVTLNARSHLRARVQAQSXNXGLDFQXSQLVKKLVEPPPXGXQGSVISFPSPRSGPGSPAQXLLYTHPTHXXQRADLGAYLNPRPPAPEAWSEPXLLAKGSXAYSDLQSMGTGPDGSPLFGXLYEANDYEEIXFXMFTLKQAFPAEYLPQGGGGSGGGGSDKTHTCPPCPAPELLGGPSVFLFPPKPKDTLMISRTPEVTCVVVDVSHEDPEVKFNWYVDGVEVHNAKTKPREEQYNSTYRVVSVLTVLHQDWLNGKEYKCKVSNKALPAPIEKTISKAKGQPREPQVYTLPPSREEMTKNQVSLTCLVKGFYPSDIAVEWESNGQPENNYKTTPPVLDSDGSFFLTSKLTVDKSRWQQGNVFSCSVMHEALHNHYTQKSLSLSPGK

SEQ ID NO: 77 - protein, 874 aa, Artificial Sequence
  Description of Artificial Sequence: Synthetic polypeptide
DASLPYLQKESVFQSGAHAYRIPALLYLPGQQSLLAFAEQRASKKDEHAELIVLRRGDYDAGTHQVQWQAQEVVAQARLDGHRSMNPCPLYDEQTGTLFLFFIAIPGQVTEQQQLQTRANVTRLCQVTSTDHGRTWSSPRDLTDAAIGPAYREWSTFAVGPGHCLQLHDRARSLVVPAYAYRKLHPKQRPIPSAFCFLSHDHGRTWARGHFVAQDTLECQVAEVETGEQRVVTLNARSHLRARVQAQSTNDGLDFQESQLVKKLVEPPPQGCQGSVISFPSPRSGPGSPAQWLLYTHPTHSWQRADLGAYLNPRPPAPEAWSEPVLLAKGSAAYSDLQSMGTGPDGSPLFGCLYEANDYEEIVFLMFTLKQAFPAEYLPQGGGGSGGGGSDKTHTCPPCPAPELLGGPSVFLFPPKPKDTLMISRTPEVTCVVVDVSHEDPEVKFNWYVDGVEVHNAKTKPREEQYNSTYRVVSVLTVLHQDWLNGKEYKCKVSNKALPAPIEKTISKAKGQPREPQVYTLPPSREEMTKNQVSLTCLVKGFYPSDIAVEWESNGQPENNYKTTPPVLDSDGSFFLYSKLTVDKSRWQQGNVFSCSVMHEALHNHYTQKSLSLSPGKGGGGSGGGGSGGGGSEVQLVESGGGLVQPGGSLRLSCAASGFNIKDTYIHWVRQAPGKGLEWVARIYPTNGYTRYADSVKGRFTISADTSKNTAYLQMNSLRAEDTAVYYCSRWGGDGFYAMDYWGQGTLVTVSSGGGGSGGGGSGGGGSDIQMTQSPSSLSASVGDRVTITCRASQDVNTAVAWYQQKPGKAPKLLIYSASFLYSGVPSRFSGSRSGTDFTLTISSLQPEDFATYYCQQHYTTPPTFGQGTKVEIK

SEQ ID NO: 78 - protein, 874 aa, Artificial Sequence
  Description of Artificial Sequence: Synthetic polypeptide
DASLPYLQDESVFQSGAHAYRIPALLYLPGQQSLLAFAEQRASKKDEHAELIVLRRGDYDAPTHQVQWQAQEVVAQARLDGHRSMNPCPLYDEQTGTLFLFFIAIPGQVTEQQQLQTRANVTRLCQVTSTDHGRTWSSPRDLTDAAIGPAYREWSTFAVGPGHCLQLHDRARSLVVPAYAYRKLHPKQRPIPSAFCFLSHDHGRTWARGHFVAQDTLECQVAEVETGEQRVVTLNARSHLRARVQAQSTNDGLDFQESQLVKKLVEPPPQGCQGSVISFPSPRSGPGSPAQWLLYTHPTHSWQRADLGAYLNPRPPAPEAWSEPVLLAKGSAAYSDLQSMGTGPDGSPLFGCLYEANDYEEIRFIMFTLKQAFPAEYLPQGGGGSGGGGSDKTHTCPPCPAPELLGGPSVFLFPPKPKDTLMISRTPEVTCVVVDVSHEDPEVKFNWYVDGVEVHNAKTKPREEQYNSTYRVVSVLTVLHQDWLNGKEYKCKVSNKALPAPIEKTISKAKGQPREPQVYTLPPSREEMTKNQVSLTCLVKGFYPSDIAVEWESNGQPENNYKTTPPVLDSDGSFFLYSKLTVDKSRWQQGNVFSCSVMHEALHNHYTQKSLSLSPGKGGGGSGGGGSGGGGSEVQLVESGGGLVQPGGSLRLSCAASGFNIKDTYIHWVRQAPGKGLEWVARIYPTNGYTRYADSVKGRFTISADTSKNTAYLQMNSLRAEDTAVYYCSRWGGDGFYAMDYWGQGTLVTVSSGGGGSGGGGSGGGGSDIQMTQSPSSLSASVGDRVTITCRASQDVNTAVAWYQQKPGKAPKLLIYSASFLYSGVPSRFSGSRSGTDFTLTISSLQPEDFATYYCQQHYTTPPTFGQGTKVEIK

SEQ ID NO: 79 - protein, 874 aa, Artificial Sequence
  Description of Artificial Sequence: Synthetic polypeptide
DASLPYLQKESVFQSGAHAYRIPALLYLPGQQSLLAFAEQRASKKDEHAELIVLRRGDYDANTHQVQWQAQEVVAQARLDGHRSMNPCPLYDAQTGTLFLFFIAIPGQVTEQQQLQTRANVTRLCQVTSTDHGRTWSSPRDLTDAAIGPAYREWSTFAVGPGHCLQLHDRARSLVVPAYAYRKLHPKQRPIPSAFCFLSHDHGRTWARGHFVAQDTLECQVAEVETGEQRVVTLNARSHLRARVQAQSTNDGLDFQESQLVKKLVEPPPQGCQGSVISFPSPRSGPGSPAQWLLYTHPTHSWQRADLGAYLNPRPPAPEAWSEPVLLAKGSAAYSDLQSMGTGPDGSPLFGCLYEANDYEEIVFLMFTLKQAFPAEYLPQGGGGSGGGGSDKTHTCPPCPAPELLGGPSVFLFPPKPKDTLMISRTPEVTCVVVDVSHEDPEVKFNWYVDGVEVHNAKTKPREEQYNSTYRVVSVLTVLHQDWLNGKEYKCKVSNKALPAPIEKTISKAKGQPREPQVYTLPPSREEMTKNQVSLTCLVKGFYPSDIAVEWESNGQPENNYKTTPPVLDSDGSFFLYSKLTVDKSRWQQGNVFSCSVMHEALHNHYTQKSLSLSPGKGGGGSGGGGSGGGGSEVQLVESGGGLVQPGGSLRLSCAASGFNIKDTYIHWVRQAPGKGLEWVARIYPTNGYTRYADSVKGRFTISADTSKNTAYLQMNSLRAEDTAVYYCSRWGGDGFYAMDYWGQGTLVTVSSGGGGSGGGGSGGGGSDIQMTQSPSSLSASVGDRVTITCRASQDVNTAVAWYQQKPGKAPKLLIYSASFLYSGVPSRFSGSRSGTDFTLTISSLQPEDFATYYCQQHYTTPPTFGQGTKVEIK

SEQ ID NO: 80 - protein, 874 aa, Artificial Sequence
  Description of Artificial Sequence: Synthetic polypeptide
DASLPYLQKESVFQSGAHAYRIPALLYLPGQQSLLAFAEQRASKKDEHAELIVLRRGDYDAPTHQVQWQAQEVVAQARLDGHRSMNPCPLYDAQTGTLFLFFIAIPGQVTEQQQLQTRANVTRLCQVTSTDHGRTWSSPRDLTDAAIGPAYREWSTFAVGPGHCLQLHDRARSLVVPAYAYRKLHPKQRPIPSAFCFLSHDHGRTWARGHFVAQDTLECQVAEVETGEQRVVTLNARSHLRARVQAQSTNDGLDFQESQLVKKLVEPPPAGCQGSVISFPSPRSGPGSPAQWLLYTHPTHRKQRADLGAYLNPRPPAPEAWSEPVLLAKGSAAYSDLQSMGTGPDGSPLFGCLYEANDYEEIVFLMFTLKQAFPAEYLPQGGGGSGGGGSDKTHTCPPCPAPELLGGPSVFLFPPKPKDTLMISRTPEVTCVVVDVSHEDPEVKFNWYVDGVEVHNAKTKPREEQYNSTYRVVSVLTVLHQDWLNGKEYKCKVSNKALPAPIEKTISKAKGQPREPQVYTLPPSREEMTKNQVSLTCLVKGFYPSDIAVEWESNGQPENNYKTTPPVLDSDGSFFLYSKLTVDKSRWQQGNVFSCSVMHEALHNHYTQKSLSLSPGKGGGGSGGGGSGGGGSEVQLVESGGGLVQPGGSLRLSCAASGFNIKDTYIHWVRQAPGKGLEWVARIYPTNGYTRYADSVKGRFTISADTSKNTAYLQMNSLRAEDTAVYYCSRWGGDGFYAMDYWGQGTLVTVSSGGGGSGGGGSGGGGSDIQMTQSPSSLSASVGDRVTITCRASQDVNTAVAWYQQKPGKAPKLLIYSASFLYSGVPSRFSGSRSGTDFTLTISSLQPEDFATYYCQQHYTTPPTFGQGTKVEIK

SEQ ID NO: 81 - protein, 874 aa, Artificial Sequence
  Description of Artificial Sequence: Synthetic polypeptide
DASLPYLQKESVFQSGAHAYRIPALLYLPGQQSLLAFAEQRASKKDEHAELIVLRRGDYDASTHQVQWQAQEVVAQARLDGHRSMNPCPLYDAQTGTLFLFFIAIPGQVTEQQQLQTRANVTRLCQVTSTDHGRTWSSPRDLTDAAIGPAYREWSTFAVGPGHCLQLHDRARSLVVPAYAYRKLHPKQRPIPSAFCFLSHDHGRTWARGHFVAQDTLECQVAEVETGEQRVVTLNARSHLRARVQAQSTNDGLDFQESQLVKKLVEPPPAGCQGSVISFPSPRSGPGSPAQWLLYTHPTHRKQRADLGAYLNPRPPAPEAWSEPVLLAKGSAAYSDLQSMGTGPDGSPLFGCLYEANDYEEIVFLMFTLKQAFPAEYLPQGGGGSGGGGSDKTHTCPPCPAPELLGGPSVFLFPPKPKDTLMISRTPEVTCVVVDVSHEDPEVKFNWYVDGVEVHNAKTKPREEQYNSTYRVVSVLTVLHQDWLNGKEYKCKVSNKALPAPIEKTISKAKGQPREPQVYTLPPSREEMTKNQVSLTCLVKGFYPSDIAVEWESNGQPENNYKTTPPVLDSDGSFFLYSKLTVDKSRWQQGNVFSCSVMHEALHNHYTQKSLSLSPGKGGGGSGGGGSGGGGSEVQLVESGGGLVQPGGSLRLSCAASGFNIKDTYIHWVRQAPGKGLEWVARIYPTNGYTRYADSVKGRFTISADTSKNTAYLQMNSLRAEDTAVYYCSRWGGDGFYAMDYWGQGTLVTVSSGGGGSGGGGSGGGGSDIQMTQSPSSLSASVGDRVTITCRASQDVNTAVAWYQQKPGKAPKLLIYSASFLYSGVPSRFSGSRSGTDFTLTISSLQPEDFATYYCQQHYTTPPTFGQGTKVEIK

SEQ ID NO: 82 - protein, 874 aa, Artificial Sequence
  Description of Artificial Sequence: Synthetic polypeptide
DASLPYLQKESVFQSGAHAYRIPALLYLPGQQSLLAFAEQRASKKDEHAELIVLRRGDYDATTHQVQWQAQEVVAQARLDGHRSMNPCPLYDAQTGTLFLFFIAIPGQVTEQQQLQTRANVTRLCQVTSTDHGRTWSSPRDLTDAAIGPAYREWSTFAVGPGHCLQLHDRARSLVVPAYAYRKLHPKQRPIPSAFCFLSHDHGRTWARGHFVAQDTLECQVAEVETGEQRVVTLNARSHLRARVQAQSTNDGLDFQESQLVKKLVEPPPAGCQGSVISFPSPRSGPGSPAQWLLYTHPTHRKQRADLGAYLNPRPPAPEAWSEPVLLAKGSAAYSDLQSMGTGPDGSPLFGCLYEANDYEEIVFLMFTLKQAFPAEYLPQGGGGSGGGGSDKTHTCPPCPAPELLGGPSVFLFPPKPKDTLMISRTPEVTCVVVDVSHEDPEVKFNWYVDGVEVHNAKTKPREEQYNSTYRVVSVLTVLHQDWLNGKEYKCKVSNKALPAPIEKTISKAKGQPREPQVYTLPPSREEMTKNQVSLTCLVKGFYPSDIAVEWESNGQPENNYKTTPPVLDSDGSFFLYSKLTVDKSRWQQGNVFSCSVMHEALHNHYTQKSLSLSPGKGGGGSGGGGSGGGGSEVQLVESGGGLVQPGGSLRLSCAASGFNIKDTYIHWVRQAPGKGLEWVARIYPTNGYTRYADSVKGRFTISADTSKNTAYLQMNSLRAEDTAVYYCSRWGGDGFYAMDYWGQGTLVTVSSGGGGSGGGGSGGGGSDIQMTQSPSSLSASVGDRVTITCRASQDVNTAVAWYQQKPGKAPKLLIYSASFLYSGVPSRFSGSRSGTDFTLTISSLQPEDFATYYCQQHYTTPPTFGQGTKVEIK

SEQ ID NO: 83 - protein, 874 aa, Artificial Sequence
  Description of Artificial Sequence: Synthetic polypeptide
DASLPYLQKESVFQSGAHAYRIPALLYLPGQQSLLAFAEQRASKKDEHAELIVLRRGDYDANTHQVQWQAQEVVAQARLDGHRSMNPCPLYDAQTGTLFLFFIAIPGQVTEQQQLQTRANVTRLCQVTSTDHGRTWSSPRDLTDAAIGPAYREWSTFAVGPGHCLQLHDRARSLVVPAYAYRKLHPKQRPIPSAFCFLSHDHGRTWARGHFVAQDTLECQVAEVETGEQRVVTLNARSHLRARVQAQSTNDGLDFQESQLVKKLVEPPPAGCQGSVISFPSPRSGPGSPAQWLLYTHPTHRKQRADLGAYLNPRPPAPEAWSEPVLLAKGSAAYSDLQSMGTGPDGSPLFGCLYEANDYEEIVFLMFTLKQAFPAEYLPQGGGGSGGGGSDKTHTCPPCPAPELLGGPSVFLFPPKPKDTLMISRTPEVTCVVVDVSHEDPEVKFNWYVDGVEVHNAKTKPREEQYNSTYRVVSVLTVLHQDWLNGKEYKCKVSNKALPAPIEKTISKAKGQPREPQVYTLPPSREEMTKNQVSLTCLVKGFYPSDIAVEWESNGQPENNYKTTPPVLDSDGSFFLYSKLTVDKSRWQQGNVFSCSVMHEALHNHYTQKSLSLSPGKGGGGSGGGGSGGGGSEVQLVESGGGLVQPGGSLRLSCAASGFNIKDTYIHWVRQAPGKGLEWVARIYPTNGYTRYADSVKGRFTISADTSKNTAYLQMNSLRAEDTAVYYCSRWGGDGFYAMDYWGQGTLVTVSSGGGGSGGGGSGGGGSDIQMTQSPSSLSASVGDRVTITCRASQDVNTAVAWYQQKPGKAPKLLIYSASFLYSGVPSRFSGSRSGTDFTLTISSLQPEDFATYYCQQHYTTPPTFGQGTKVEIK

SEQ ID NO: 84 - protein, 874 aa, Artificial Sequence
  Description of Artificial Sequence: Synthetic polypeptide
  MOD_RES (1)..(1): Any amino acid
  MOD_RES (6)..(6): Any amino acid
  MOD_RES (9)..(9): Any amino acid
  MOD_RES (62)..(62): Any amino acid
  MOD_RES (93)..(93): Any amino acid
  MOD_RES (187)..(187): Any amino acid
  MOD_RES (270)..(270): Any amino acid
  MOD_RES (301)..(302): Any amino acid
  MOD_RES (332)..(332): Any amino acid
  MOD_RES (363)..(363): Any amino acid
  MOD_RES (365)..(365): Any amino acid
XASLPXLQXESVFQSGAHAYRIPALLYLPGQQSLLAFAEQRASKKDEHAELIVLRRGDYDAXTHQVQWQAQEVVAQARLDGHRSMNPCPLYDXQTGTLFLFFIAIPGQVTEQQQLQTRANVTRLCQVTSTDHGRTWSSPRDLTDAAIGPAYREWSTFAVGPGHCLQLHDRARSLVVPAYAYRKLHPXQRPIPSAFCFLSHDHGRTWARGHFVAQDTLECQVAEVETGEQRVVTLNARSHLRARVQAQSTNDGLDFQESQLVKKLVEPPPXGCQGSVISFPSPRSGPGSPAQWLLYTHPTHXXQRADLGAYLNPRPPAPEAWSEPVLLAKGSXAYSDLQSMGTGPDGSPLFGCLYEANDYEEIXFXMFTLKQAFPAEYLPQGGGGSGGGGSDKTHTCPPCPAPELLGGPSVFLFPPKPKDTLMISRTPEVTCVVVDVSHEDPEVKFNWYVDGVEVHNAKTKPREEQYNSTYRVVSVLTVLHQDWLNGKEYKCKVSNKALPAPIEKTISKAKGQPREPQVYTLPPSREEMTKNQVSLTCLVKGFYPSDIAVEWESNGQPENNYKTTPPVLDSDGSFFLYSKLTVDKSRWQQGNVFSCSVMHEALHNHYTQKSLSLSPGKGGGGSGGGGSGGGGSEVQLVESGGGLVQPGGSLRLSCAASGFNIKDTYIHWVRQAPGKGLEWVARIYPTNGYTRYADSVKGRFTISADTSKNTAYLQMNSLRAEDTAVYYCSRWGGDGFYAMDYWGQGTLVTVSSGGGGSGGGGSGGGGSDIQMTQSPSSLSASVGDRVTITCRASQDVNTAVAWYQQKPGKAPKLLIYSASFLYSGVPSRFSGSRSGTDFTLTISSLQPEDFATYYCQQHYTTPPTFGQGTKVEIK

SEQ ID NO: 85 - protein, 874 aa, Artificial Sequence
  Description of Artificial Sequence: Synthetic polypeptide
  MOD_RES (1)..(2): Any amino acid
  MOD_RES (4)..(6): Any amino acid
  MOD_RES (9)..(9): Any amino acid
  MOD_RES (44)..(45): Any amino acid
  MOD_RES (54)..(54): Any amino acid
  MOD_RES (62)..(62): Any amino acid
  MOD_RES (69)..(69): Any amino acid
  MOD_RES (78)..(78): Any amino acid
  MOD_RES (93)..(93): Any amino acid
  MOD_RES (107)..(108): Any amino acid
  MOD_RES (112)..(112): Any amino acid
  MOD_RES (125)..(126): Any amino acid
  MOD_RES (150)..(150): Any amino acid
  MOD_RES (164)..(164): Any amino acid
  MOD_RES (171)..(171): Any amino acid
  MOD_RES (187)..(187): Any amino acid
  MOD_RES (196)..(196): Any amino acid
  MOD_RES (217)..(217): Any amino acid
  MOD_RES (249)..(249): Any amino acid
  MOD_RES (251)..(251): Any amino acid
  MOD_RES (257)..(257): Any amino acid
  MOD_RES (270)..(270): Any amino acid
  MOD_RES (272)..(272): Any amino acid
  MOD_RES (292)..(292): Any amino acid
  MOD_RES (301)..(302): Any amino acid
  MOD_RES (325)..(325): Any amino acid
  MOD_RES (332)..(332): Any amino acid
  MOD_RES (352)..(352): Any amino acid
  MOD_RES (363)..(363): Any amino acid
  MOD_RES (365)..(365): Any amino acid
XXSXXXLQXESVFQSGAHAYRIPALLYLPGQQSLLAFAEQRASXXDEHAELIVXRRGDYDAXTHQVQWXAQEVVAQAXLDGHRSMNPCPLYDXQTGTLFLFFIAIPXXVTEXQQLQTRANVTRLXXVTSTDHGRTWSSPRDLTDAAIGPXYREWSTFAVGPGHXLQLHDRXRSLVVPAYAYRKLHPXQRPIPSAFXFLSHDHGRTWARGHFVAQDTXECQVAEVETGEQRVVTLNARSHLRARVQAQSXNXGLDFQXSQLVKKLVEPPPXGXQGSVISFPSPRSGPGSPAQXLLYTHPTHXXQRADLGAYLNPRPPAPEAWSEPXLLAKGSXAYSDLQSMGTGPDGSPLFGXLYEANDYEEIXFXMFTLKQAFPAEYLPQGGGGSGGGGSDKTHTCPPCPAPELLGGPSVFLFPPKPKDTLMISRTPEVTCVVVDVSHEDPEVKFNWYVDGVEVHNAKTKPREEQYNSTYRVVSVLTVLHQDWLNGKEYKCKVSNKALPAPIEKTISKAKGQPREPQVYTLPPSREEMTKNQVSLTCLVKGFYPSDIAVEWESNGQPENNYKTTPPVLDSDGSFFLYSKLTVDKSRWQQGNVFSCSVMHEALHNHYTQKSLSLSPGKGGGGSGGGGSGGGGSEVQLVESGGGLVQPGGSLRLSCAASGFNIKDTYIHWVRQAPGKGLEWVARIYPTNGYTRYADSVKGRFTISADTSKNTAYLQMNSLRAEDTAVYYCSRWGGDGFYAMDYWGQGTLVTVSSGGGGSGGGGSGGGGSDIQMTQSPSSLSASVGDRVTITCRASQDVNTAVAWYQQKPGKAPKLLIYSASFLYSGVPSRFSGSRSGTDFTLTISSLQPEDFATYYCQQHYTTPPTFGQGTKVEIK

SEQ ID NO: 86 - DNA, 642 bp, Artificial Sequence
  Description of Artificial Sequence: Synthetic polynucleotide
gacatccagatgacacagagccctagcagcctgtctgccagcgtgggagacagagtgaccatcacctgtagagccagccaggacgtgaacacagccgtggcttggtatcagcagaagcctggcaaggcccctaagctgctgatctacagcgccagctttctgtactccggcgtgcccagcagattcagcggctctagaagcggcaccgacttcaccctgaccataagcagtctgcagcccgaggacttcgccacctactactgtcagcagcactacaccacacctccaacctttggccagggcaccaaggtggaaatcaagcgtacggtggctgcaccatctgtcttcatcttcccgccatctgatgagcagttgaaatctggaactgcctctgttgtgtgcctgctgaataacttctatcccagagaggccaaagtacagtggaaggtggataacgccctccaatcgggtaactcccaggagagtgtcacagagcaggacagcaaggacagcacctacagcctcagcagcaccctgacgctgagcaaagcagactacgagaaacacaaagtctacgcctgcgaagtcacccatcagggcctgagctcgcccgtcacaaagagcttcaacaggggagagtgt

SEQ ID NO: 87 - DNA, 1350 bp, Artificial Sequence
  Description of Artificial Sequence: Synthetic polynucleotide
gaggtgcagctggttgaatctggcggaggactggttcagcctggcggatctctgagactgtcttgtgccgccagcggcttcaacatcaaggacacctacatccactgggtccgacaggcccctggcaaaggacttgaatgggtcgccagaatctaccccaccaacggctacaccagatacgccgactctgtgaagggcagattcaccatcagcgccgacaccagcaagaacaccgcctacctgcagatgaacagcctgagagccgaggacaccgccgtgtactactgttctagatggggaggcgacggcttctacgccatggattattggggccagggcaccctggtcaccgtttcttctgctagcaccaagggcccatccgtcttccccctggcaccctcctccaagagcacctctgggggcacagcggccctgggctgcctggtcaaggactacttccccgaaccggtgacggtgtcctggaactcaggcgctctgaccagcggcgtgcacaccttcccggctgtcctacagtcctcaggactctactccctcagcagcgtggtgaccgtgccctccagcagcttgggcacccagacctacatctgcaacgtgaatcacaagcccagcaacaccaaggtggacaagaaagttgagcccaaatcttgtgacaaaactcacacatgcccaccgtgcccagcacctgaactcctggggggaccgtcagtcttcctcttccccccaaaacccaaggacaccctcatgatctcccggacccctgaggtcacatgcgtggtggtggacgtgagccacgaagaccctgaggtcaagttcaactggtacgtggacggcgtggaggtgcataatgccaagacaaagccgcgggaggagcagtacaacagcacgtaccgtgtggtcagcgtcctcaccgtcctgcaccaggactggctgaatggcaaggagtacaagtgcaaggtctccaacaaagccctcccagcccccatcgagaaaaccatctccaaagccaaagggcagccccgagaaccacaggtctacaccctgcccccatcccgggaggagatgaccaagaaccaggtcagcctgtactgcctggtcaaaggcttctatcccagcgacatcgccgtggagtgggagagcaatgggcagccggagaacaactacaagaccacgcctcccgtgctggactccgacggctccttcttcctctatagcaagctcaccgtggacaagagcaggtggcagcaggggaacgtcttctcatgctccgtgatgcatgaggctctgcacaaccactacacgcagaagagcctctccctgtctccgggtaaa

SEQ ID NO: 88 - DNA, 1851 bp, Artificial Sequence
  Description of Artificial Sequence: Synthetic polynucleotide
gatgcatctctgccttacctgcagaaagaaagcgtgttccagtctggcgcccacgcctacagaattcccgctctgctgtatctgccaggccagcagtctctgctggctttcgctgaacagcgggccagcaagaaggatgagcacgccgaactgatcgtgctgcggagaggcgattacgacgccggcacacatcaggtgcagtggcaggctcaagaggtggtggctcaggctagactggacggccacagatctatgaacccctgtcctctgtacgatgaacagaccggcacactgtttctgttctttatcgctatccccggccaagtgaccgagcagcagcagctgcagacaagagccaacgtgaccagactgtgtcaagtgacctccaccgaccacggcagaacctggtctagccctagagatctgaccgacgccgccatcggacctgcctatagagagtggtccaccttcgccgttggacctggacactgtctccagctgcacgacagggctagatctctggtggtgcctgcctacgcctatagaaagctgcaccccaaacagcggcctattcctagcgccttctgctttctgagccacgatcacggcaggacatgggccagaggacatttcgtggcccaggacacactggaatgccaggtggccgaagtggaaaccggcgagcagagagtcgtgaccctgaacgccagatctcacctgagagccagagtgcaggcccagagcacaaacgacggcctggatttccaagagagccagctggtcaagaaactggtggaacctcctccacagggctgtcagggaagcgtgatcagctttccatctcctagaagcggccctggctctcctgctcagtggctgctgtatacacaccccacacacagctggcagagagccgatctgggcgcctacctgaatcctagacctcctgctcctgaggcttggagcgaacctgttctgctggccaagggcagcgctgcctacagcgatctgcagtctatgggcacaggccctgatggcagccctctgtttggctgtctgtacgaggccaacgactacgaagagatcgtgttcctgatgttcaccctgaagcaggcctttccagccgagtacctgcctcaaggcggaggtggaagtggcggaggcggatccgacaaaactcacacatgcccaccgtgcccagcacctgaactcctggggggaccgtcagtcttcctcttccccccaaaacccaaggacaccctcatgatctcccggacccctgaggtcacatgcgtggtggtggacgtgagccacgaagaccctgaggtcaagttcaactggtacgtggacggcgtggaggtgcataatgccaagacaaagccgcgggaggagcagtacaacagcacgtaccgtgtggtcagcgtcctcaccgtcctgcaccaggactggctgaatggcaaggagtacaagtgcaaggtctccaacaaagccctcccagcccccatcgagaaaaccatctccaaagccaaagggcagccccgagaaccacaggtctacaccctgcccccatcccgggaggagatgaccaagaaccaggtcagcctgacctgcctggtcaaaggcttctatcccagcgacatcgccgtggagtgggagagcaatgggcagccggagaacaactacaagaccacgcctcccgtgctggactccgacggctccttcttcctcactagcaagctcaccgtggacaagagcaggtggcagcaggggaacgtcttctcatgctccgtgatgcatgaggctctgcacaaccactacacgcagaagagcctctccctgtctccgggtaaa

SEQ ID NO: 89 - DNA, 1140 bp, Artificial Sequence
  Description of Artificial Sequence: Synthetic polynucleotide
gatgcatctctgccttacctgcagaaagaaagcgtgttccagtctggcgcccacgcctacagaattcccgctctgctgtatctgccaggccagcagtctctgctggctttcgctgaacagcgggccagcaagaaggatgagcacgccgaactgatcgtgctgcggagaggcgattacgacgccggcacacatcaggtgcagtggcaggctcaagaggtggtggctcaggctagactggacggccacagatctatgaacccctgtcctctgtacgatgaacagaccggcacactgtttctgttctttatcgctatccccggccaagtgaccgagcagcagcagctgcagacaagagccaacgtgaccagactgtgtcaagtgacctccaccgaccacggcagaacctggtctagccctagagatctgaccgacgccgccatcggacctgcctatagagagtggtccaccttcgccgttggacctggacactgtctccagctgcacgacagggctagatctctggtggtgcctgcctacgcctatagaaagctgcaccccaaacagcggcctattcctagcgccttctgctttctgagccacgatcacggcaggacatgggccagaggacatttcgtggcccaggacacactggaatgccaggtggccgaagtggaaaccggcgagcagagagtcgtgaccctgaacgccagatctcacctgagagccagagtgcaggcccagagcacaaacgacggcctggatttccaagagagccagctggtcaagaaactggtggaacctcctccacagggctgtcagggaagcgtgatcagctttccatctcctagaagcggccctggctctcctgctcagtggctgctgtatacacaccccacacacagctggcagagagccgatctgggcgcctacctgaatcctagacctcctgctcctgaggcttggagcgaacctgttctgctggccaagggcagcgctgcctacagcgatctgcagtctatgggcacaggccctgatggcagccctctgtttggctgtctgtacgaggccaacgactacgaagagatcgtgttcctgatgttcaccctgaagcaggcctttccagccgagtacctgcctcaa

SEQ ID NO: 90 - protein, 618 aa, Artificial Sequence
  Description of Artificial Sequence: Synthetic polypeptide
TVEKSVVFKAEGEHFTDQKGNTIVGSGSGGTTKYFRIPAMCTTSKGTIVVFADARHNTASDQSFIDTAAARSTDGGKTWNKKIAIYNDRVNSKLSRVMDPTCIVANIQGRETILVMVGKWNNNDKTWGAYRDKAPDTDWDLVLYKSTDDGVTFSKVETNIHDIVTKNGTISAMLGGVGSGLQLNDGKLVFPVQMVRTKNITTVLNTSFIYSTDGITWSLPSGYCEGFGSENNIIEFNASLVNNIRNSGLRRSFETKDFGKTWTEFPPMDKKVDNRNHGVQGSTITIPSGNKLVAAHSSAQNKNNDYTRSDISLYAHNLYSGEVKLIDDFYPKVGNASGAGYSCLSYRKNVDKETLYVVYEANGSIEFQDLSRHLPVIKSYNGGGGSGGGGSDKTHTCPPCPAPELLGGPSVFLFPPKPKDTLMISRTPEVTCVVVDVSHEDPEVKFNWYVDGVEVHNAKTKPREEQYNSTYRVVSVLTVLHQDWLNGKEYKCKVSNKALPAPIEKTISKAKGQPREPQVYTLPPSREEMTKNQVSLTCLVKGFYPSDIAVEWESNGQPENNYKTTPPVLDSDGSFFLTSKLTVDKSRWQQGNVFSCSVMHEALHNHYTQKSLSLSPGK

SEQ ID NO: 91 - DNA, 1854 bp, Artificial Sequence
  Description of Artificial Sequence: Synthetic polynucleotide
acagtggaaaagtccgtggtgttcaaggccgagggcgagcacttcaccgaccagaaaggcaataccatcgtcggctctggcagcggcggcaccaccaagtactttagaatccccgccatgtgcaccaccagcaagggcaccattgtggtgttcgccgacgccagacacaacaccgccagcgatcagagcttcatcgataccgctgccgccagatctaccgatggcggcaagacctggaacaagaagatcgccatctacaacgaccgcgtgaacagcaagctgagcagagtgatggaccctacctgcatcgtggccaacatccagggcagagaaaccatcctggtcatggtcggaaagtggaacaacaacgataagacctggggcgcctacagagacaaggcccctgataccgattgggacctcgtgctgtacaagagcaccgatgacggcgtgaccttcagcaaggtggaaacaaacatccacgacatcgtgaccaagaacggcaccatctctgccatgctcggcggcgttggatctggcctgcaactgaatgatggcaagctggtgttccccgtgcagatggtccgaacaaagaatatcaccaccgtgctgaataccagcttcatctacagcaccgacggcatcacatggtccctgcctagcggctactgtgaaggctttggcagcgagaacaacatcatcgagttcaacgccagcctggtcaacaacatccggaacagcggcctgcggagaagcttcgagacaaaggacttcggaaagacgtggaccgagtttcctccaatggacaagaaggtggacaaccggaaccacggcgtgcagggcagcacaatcacaatccctagcggcaacaaactggtggccgctcactctagcgcccagaacaagaacaacgactacaccagaagcgacatcagcctgtacgcccacaacctgtacagcggcgaagtgaagctgatcgacgacttctaccccaaagtgggcaatgccagcggagccggctacagctgtctgagctaccggaaaaatgtggacaaagaaaccctgtacgtggtgtacgaggccaacggcagcatcgagtttcaggacctgagcagacatctgcccgtgatcaagagctacaacggcggaggtggaagtggcggaggcggatccgacaaaactcacacatgcccaccgtgcccagcacctgaactcctggggggaccgtcagtcttcctcttccccccaaaacccaaggacaccctcatgatctcccggacccctgaggtcacatgcgtggtggtggacgtgagccacgaagaccctgaggtcaagttcaactggtacgtggacggcgtggaggtgcataatgccaagacaaagccgcgggaggagcagtacaacagcacgtaccgtgtggtcagcgtcctcaccgtcctgcaccaggactggctgaatggcaaggagtacaagtgcaaggtctccaacaaagccctcccagcccccatcgagaaaaccatctccaaagccaaagggcagccccgagaaccacaggtctacaccctgcccccatcccgggaggagatgaccaagaaccaggtcagcctgacctgcctggtcaaaggcttctatcccagcgacatcgccgtggagtgggagagcaatgggcagccggagaacaactacaagaccacgcctcccgtgctggactccgacggctccttcttcctcactagcaagctcaccgtggacaagagcaggtggcagcaggggaacgtcttctcatgctccgtgatgcatgaggctctgcacaaccactacacgcagaagagcctctccctgtctccgggtaaa

SEQ ID NO: 92 - protein, 846 aa, Artificial Sequence
  Description of Artificial Sequence: Synthetic polypeptide
EVQLVESGGGLVQPGGSLRLSCAASGFNIKDTYIHWVRQAPGKGLEWVARIYPTNGYTRYADSVKGRFTISADTSKNTAYLQMNSLRAEDTAVYYCSRWGGDGFYAMDYWGQGTLVTVSSASTKGPSVFPLAPSSKSTSGGTAALGCLVKDYFPEPVTVSWNSGALTSGVHTFPAVLQSSGLYSLSSVVTVPSSSLGTQTYICNVNHKPSNTKVDKKVEPKSCDKTHTCPPCPAPELLGGPSVFLFPPKPKDTLMISRTPEVTCVVVDVSHEDPEVKFNWYVDGVEVHNAKTKPREEQYNSTYRVVSVLTVLHQDWLNGKEYKCKVSNKALPAPIEKTISKAKGQPREPQVYTLPPSREEMTKNQVSLTCLVKGFYPSDIAVEWESNGQPENNYKTTPPVLDSDGSFFLYSKLTVDKSRWQQGNVFSCSVMHEALHNHYTQKSLSLSPGKGGGGSGGGGSGGGGSTVEKSVVFKAEGEHFTDQKGNTIVGSGSGGTTKYFRIPAMCTTSKGTIVVFADARHNTASDQSFIDTAAARSTDGGKTWNKKIAIYNDRVNSKLSRVMDPTCIVANIQGRETILVMVGKWNNNDKTWGAYRDKAPDTDWDLVLYKSTDDGVTFSKVETNIHDIVTKNGTISAMLGGVGSGLQLNDGKLVFPVQMVRTKNITTVLNTSFIYSTDGITWSLPSGYCEGFGSENNIIEFNASLVNNIRNSGLRRSFETKDFGKTWTEFPPMDKKVDNRNHGVQGSTITIPSGNKLVAAHSSAQNKNNDYTRSDISLYAHNLYSGEVKLIDDFYPKVGNASGAGYSCLSYRKNVDKETLYVVYEANGSIEFQDLSRHLPVIKSYN

SEQ ID NO: 93 - DNA, 2538 bp, Artificial Sequence
  Description of Artificial Sequence: Synthetic polynucleotide
gaggtgcagctggttgaatctggcggaggactggttcagcctggcggatctctgagactgtcttgtgccgccagcggcttcaacatcaaggacacctacatccactgggtccgacaggcccctggcaaaggacttgaatgggtcgccagaatctaccccaccaacggctacaccagatacgccgactctgtgaagggcagattcaccatcagcgccgacaccagcaagaacaccgcctacctgcagatgaacagcctgagagccgaggacaccgccgtgtactactgttctagatggggaggcgacggcttctacgccatggattattggggccagggcaccctggtcaccgtttcttctgctagcaccaagggcccatccgtcttccccctggcaccctcctccaagagcacctctgggggcacagcggccctgggctgcctggtcaaggactacttccccgaaccggtgacggtgtcctggaactcaggcgctctgaccagcggcgtgcacaccttcccggctgtcctacagtcctcaggactctactccctcagcagcgtggtgaccgtgccctccagcagcttgggcacccagacctacatctgcaacgtgaatcacaagcccagcaacaccaaggtggacaagaaagttgagcccaaatcttgtgacaaaactcacacatgcccaccgtgcccagcacctgaactcctggggggaccgtcagtcttcctcttccccccaaaacccaaggacaccctcatgatctcccggacccctgaggtcacatgcgtggtggtggacgtgagccacgaagaccctgaggtcaagttcaactggtacgtggacggcgtggaggtgcataatgccaagacaaagccgcgggaggagcagtacaacagcacgtaccgtgtggtcagcgtcctcaccgtcctgcaccaggactggctgaatggcaaggagtacaagtgcaaggtctccaacaaagccctcccagcccccatcgagaaaaccatctccaaagccaaagggcagccccgagaaccacaggtctacaccctgcccccatcccgggaggagatgaccaagaaccaggtcagcctgacctgcctggtcaaaggcttctatcccagcgacatcgccgtggagtgggagagcaatgggcagccggagaacaactacaagaccacgcctcccgtgctggactccgacggctccttcttcctctatagcaagctcaccgtggacaagagcaggtggcagcaggggaacgtcttctcatgctccgtgatgcatgaggctctgcacaaccactacacgcagaagagcctctccctgtctccgggtaaaggtggcggaggatctggcggaggtggaagcggcggaggcggatctacagtggaaaagtccgtggtgttcaaggccgagggcgagcacttcaccgaccagaaaggcaataccatcgtcggctctggcagcggcggcaccaccaagtactttagaatccccgccatgtgcaccaccagcaagggcaccattgtggtgttcgccgacgccagacacaacaccgccagcgatcagagcttcatcgataccgctgccgccagaagtacagacggcggcaagacctggaacaagaagatcgccatctacaacgaccgcgtgaacagcaagctgagcagagtgatggaccctacctgcatcgtggccaacatccagggcagagaaaccatcctggtcatggtcggaaagtggaacaacaacgataagacctggggcgcctacagagacaaggcccctgataccgattgggacctcgtgctgtataagagcaccgacgacggcgtgaccttcagcaaggtggaaacaaacatccacgacatcgtgaccaagaacggcaccatctctgccatgctcggcggcgttggatctggcctgcaactgaatgatggcaagctggtgttccccgtgcagatggtccgaacaaagaacatcaccaccgtgctgaataccagcttcatctactccaccgacggcatcacatggtccctgcctagcggctactgtgaaggctttggcagcgagaacaacatcatcgagttcaacgccagcctggtcaacaacatccggaacagcggcctgcggagaagcttcgagacaaaggacttcggaaagacgtggaccgagtttcctccaatggacaagaaggtggacaaccggaaccacggcgtgcagggcagcacaatcacaatccctagcggcaacaaactggtggccgctcactctagcgcccagaacaagaacaacgattacaccagaagcgacatcagcctgtacgcccacaacctgtactccggcgaagtgaagctgatcgacgacttctaccccaaagtgggcaatgccagcggagccggctacagctgtctgagctaccggaaaaatgtggacaaagaaaccctgtacgtggtgtacgaggccaacggcagcatcgagtttcaggacctgagcagacatctgcccgtgatcaagagctacaat

SEQ ID NO: 94 - protein, 875 aa, Artificial Sequence
  Description of Artificial Sequence: Synthetic polypeptide
TVEKSVVFKAEGEHFTDQKGNTIVGSGSGGTTKYFRIPAMCTTSKGTIVVFADARHNTASDQSFIDTAAARSTDGGKTWNKKIAIYNDRVNSKLSRVMDPTCIVANIQGRETILVMVGKWNNNDKTWGAYRDKAPDTDWDLVLYKSTDDGVTFSKVETNIHDIVTKNGTISAMLGGVGSGLQLNDGKLVFPVQMVRTKNITTVLNTSFIYSTDGITWSLPSGYCEGFGSENNIIEFNASLVNNIRNSGLRRSFETKDFGKTWTEFPPMDKKVDNRNHGVQGSTITIPSGNKLVAAHSSAQNKNNDYTRSDISLYAHNLYSGEVKLIDDFYPKVGNASGAGYSCLSYRKNVDKETLYVVYEANGSIEFQDLSRHLPVIKSYNGGGGSGGGGSDKTHTCPPCPAPELLGGPSVFLFPPKPKDTLMISRTPEVTCVVVDVSHEDPEVKFNWYVDGVEVHNAKTKPREEQYNSTYRVVSVLTVLHQDWLNGKEYKCKVSNKALPAPIEKTISKAKGQPREPQVYTLPPSREEMTKNQVSLTCLVKGFYPSDIAVEWESNGQPENNYKTTPPVLDSDGSFFLYSKLTVDKSRWQQGNVFSCSVMHEALHNHYTQKSLSLSPGKGGGGSGGGGSGGGGSEVQLVESGGGLVQPGGSLRLSCAASGFNIKDTYIHWVRQAPGKGLEWVARIYPTNGYTRYADSVKGRFTISADTSKNTAYLQMNSLRAEDTAVYYCSRWGGDGFYAMDYWGQGTLVTVSSGGGGSGGGGSGGGGSDIQMTQSPSSLSASVGDRVTITCRASQDVNTAVAWYQQKPGKAPKLLIYSASFLYSGVPSRFSGSRSGTDFTLTISSLQPEDFATYYCQQHYTTPPTFGQGTKVEIK

SEQ ID NO: 95 - DNA, 2625 bp, Artificial Sequence
  Description of Artificial Sequence: Synthetic polynucleotide
acagtggaaaagtccgtggtgttcaaggccgagggcgagcacttcaccgaccagaaaggcaataccatcgtcggctctggcagcggcggcaccaccaagtactttagaatccccgccatgtgcaccaccagcaagggcaccattgtggtgttcgccgacgccagacacaacaccgccagcgatcagagcttcatcgataccgctgccgccagatctaccgatggcggcaagacctggaacaagaagatcgccatctacaacgaccgcgtgaacagcaagctgagcagagtgatggaccctacctgcatcgtggccaacatccagggcagagaaaccatcctggtcatggtcggaaagtggaacaacaacgataagacctggggcgcctacagagacaaggcccctgataccgattgggacctcgtgctgtacaagagcaccgatgacggcgtgaccttcagcaaggtggaaacaaacatccacgacatcgtgaccaagaacggcaccatctctgccatgctcggcggcgttggatctggcctgcaactgaatgatggcaagctggtgttccccgtgcagatggtccgaacaaagaatatcaccaccgtgctgaataccagcttcatctacagcaccgacggcatcacatggtccctgcctagcggctactgtgaaggctttggcagcgagaacaacatcatcgagttcaacgccagcctggtcaacaacatccggaacagcggcctgcggagaagcttcgagacaaaggacttcggaaagacgtggaccgagtttcctccaatggacaagaaggtggacaaccggaaccacggcgtgcagggcagcacaatcacaatccctagcggcaacaaactggtggccgctcactctagcgcccagaacaagaacaacgactacaccagaagcgacatcagcctgtacgcccacaacctgtacagcggcgaagtgaagctgatcgacgacttctaccccaaagtgggcaatgccagcggagccggctacagctgtctgagctaccggaaaaatgtggacaaagaaaccctgtacgtggtgtacgaggccaacggcagcatcgagtttcaggacctgagcagacatctgcccgtgatcaagagctacaacggcggaggtggaagtggcggaggcggatccgacaaaactcacacatgcccaccgtgcccagcacctgaactcctggggggaccgtcagtcttcctcttccccccaaaacccaaggacaccctcatgatctcccggacccctgaggtcacatgcgtggtggtggacgtgagccacgaagaccctgaggtcaagttcaactggtacgtggacggcgtggaggtgcataatgccaagacaaagccgcgggaggagcagtacaacagcacgtaccgtgtggtcagcgtcctcaccgtcctgcaccaggactggctgaatggcaaggagtacaagtgcaaggtctccaacaaagccctcccagcccccatcgagaaaaccatctccaaagccaaagggcagccccgagaaccacaggtctacaccctgcccccatcccgggaggagatgaccaagaaccaggtcagcctgacctgcctggtcaaaggcttctatcccagcgacatcgccgtggagtgggagagcaatgggcagccggagaacaactacaagaccacgcctcccgtgctggactccgacggctccttcttcctctatagcaagctcaccgtggacaagagcaggtggcagcaggggaacgtcttctcatgctccgtgatgcatgaggctctgcacaaccactacacgcagaagagcctctccctgtctccgggtaaaggaggcggaggatctggcggaggtggaagtggcggaggcggatctgaggtgcagctggttgaatctggcggaggactggttcagcctggcggatctctgagactgtcttgtgccgccagcggcttcaacatcaaggacacctacatccactgggtccgacaggcccctggcaaaggacttgaatgggtcgccagaatctaccccaccaacggctacaccagatacgccgactctgtgaagggcagattcaccatcagcgccgacaccagcaagaacaccgcctacctgcagatgaacagcctgagagccgaggacaccgccgtgtactactgttctagatggggaggcgacggcttctacgccatggattattggggccagggcaccctggtcaccgtttcttctggcggaggaggatctggcggaggcggaagtggcggaggcggatctgacatccagatgacacagagccctagcagcctgtctgccagcgtgggagacagagtgaccatcacctgtagagccagccaggacgtgaacacagccgtggcttggtatcagcagaagcctggcaaggcccctaagctgctgatctacagcgccagctttctgtactccggcgtgcccagcagattcagcggctctagaagcggcaccgacttcaccctgaccataagcagtctgcagcccgaggacttcgccacctactactgtcagcagcactacaccacacctccaacctttggccagggcaccaaggtggaaatcaag

SEQ ID NO: 96 - protein, 618 aa, Artificial Sequence
  Description of Artificial Sequence: Synthetic polypeptide
TVEKSVVFKAEGEHFTDQKGNTIVGSGSGGTTKYFRIPAMCTTSKGTIVVFADARHNTASDQSFIDTAAARSTDGGKTWNKKIAIYNDRVNSKLSRVMVPTCIVANIQGRETILVMVGKWNNNDKTWGAYRDKAPDTDWDLVLYKSTDDGVTFSKVETNIHDIVTKNGTISAMLGGVGSGLQLNDGKLVFPVQMVRTKNITTVLNTSFIYSTDGITWSLPSGYCEGFGSVNNIIEFNASLVNNIRNSGLRRSFETKDFGKTWTEFPPMDKKVDNRNHGVQGSTITIPSGNKLVAAHSSAQNKNNDYTRSDISLYAHNLYSGEVKLIDDFYPKVGNASGAGYSCLSYRKNVDKETLYVVYEANGSIEFQDLSRHLPVIKSYNGGGGSGGGGSDKTHTCPPCPAPELLGGPSVFLFPPKPKDTLMISRTPEVTCVVVDVSHEDPEVKFNWYVDGVEVHNAKTKPREEQYNSTYRVVSVLTVLHQDWLNGKEYKCKVSNKALPAPIEKTISKAKGQPREPQVYTLPPSREEMTKNQVSLTCLVKGFYPSDIAVEWESNGQPENNYKTTPPVLDSDGSFFLTSKLTVDKSRWQQGNVFSCSVMHEALHNHYTQKSLSLSPGK

SEQ ID NO: 97 - DNA, 1854 bp, Artificial Sequence
  Description of Artificial Sequence: Synthetic polynucleotide
acagtggaaaagtccgtggtgttcaaggccgagggcgagcacttcaccgaccagaaaggcaataccatcgtcggctctggcagcggcggcaccaccaagtactttagaatccccgccatgtgcaccaccagcaagggcaccattgtggtgttcgccgacgccagacacaacaccgccagcgatcagagcttcatcgataccgctgccgccagaagtacagacggcggcaagacctggaacaagaagatcgccatctacaacgaccgcgtgaacagcaagctgagcagagtgatggtccctacctgcatcgtggccaacatccagggcagagaaaccatcctggtcatggtcggaaagtggaacaacaacgataagacctggggcgcctacagagacaaggcccctgataccgattgggacctcgtgctgtataagagcaccgacgacggcgtgaccttcagcaaggtggaaacaaacatccacgacatcgtgaccaagaacggcaccatctctgccatgctcggcggcgttggatctggcctgcaactgaatgatggcaagctggtgttccccgtgcagatggtccgaacaaagaacatcaccaccgtgctgaataccagcttcatctactccaccgacggcatcacatggtccctgcctagcggctactgtgaaggctttggcagcgtgaacaacatcatcgagttcaacgccagcctggtcaacaacatccggaacagcggcctgcggagaagcttcgagacaaaggacttcggaaagacgtggaccgagtttcctccaatggacaagaaggtggacaaccggaaccacggcgtgcagggcagcacaatcacaatccctagcggcaacaaactggtggccgctcactctagcgcccagaacaagaacaacgattacaccagaagcgacatcagcctgtacgcccacaacctgtactccggcgaagtgaagctgatcgacgacttctaccccaaagtgggcaatgccagcggagccggctacagctgtctgagctaccggaaaaatgtggacaaagaaaccctgtacgtggtgtacgaggccaacggcagcatcgagtttcaggacctgagcagacatctgcccgtgatcaagagctacaatggcggaggtggaagtggcggaggcggatccgacaaaactcacacatgcccaccgtgcccagcacctgaactcctggggggaccgtcagtcttcctcttccccccaaaacccaaggacaccctcatgatctcccggacccctgaggtcacatgcgtggtggtggacgtgagccacgaagaccctgaggtcaagttcaactggtacgtggacggcgtggaggtgcataatgccaagacaaagccgcgggaggagcagtacaacagcacgtaccgtgtggtcagcgtcctcaccgtcctgcaccaggactggctgaatggcaaggagtacaagtgcaaggtctccaacaaagccctcccagcccccatcgagaaaaccatctccaaagccaaagggcagccccgagaaccacaggtctacaccctgcccccatcccgggaggagatgaccaagaaccaggtcagcctgacctgcctggtcaaaggcttctatcccagcgacatcgccgtggagtgggagagcaatgggcagccggagaacaactacaagaccacgcctcccgtgctggactccgacggctccttcttcctcactagcaagctcaccgtggacaagagcaggtggcagcaggggaacgtcttctcatgctccgtgatgcatgaggctctgcacaaccactacacgcagaagagcctctccctgtctccgggtaaa

SEQ ID NO: 98 - protein, 611 aa, Artificial Sequence
  Description of Artificial Sequence: Synthetic polypeptide
ASLPYLQKESVFQSGAHAYRIPALLYLPGQQSLLAFAEQRASKKDEHAELIVLRRGDYDAPTHQVQWQAQEVVAQARLDGHRSMNPCPLYDAQTGTLFLFFIAIPGQVTEQQQLQTRANVTRLCQVTSTDHGRTWSSPRDLTDAAIGPAYREWSTFAVGPGHCLQLHDRARSLVVPAYAYRKLHPKQRPIPSAFCFLSHDHGRTWARGHFVAQDTLECQVAEVETGEQRVVTLNARSHLRARVQAQSTNDGLDFQESQLVKKLVEPPPQGCQGSVISFPSPRSGPGSPAQWLLYTHPTHSWQRADLGAYLNPRPPAPEAWSEPVLLAKGSCAYSDLQSMGTGPDGSPLFGCLYEANDYEEIVFLMFTLKQAFPAEYLPQEPKSSDKTHTCPPCPAPELLGGPSVFLFPPKPKDTLMISRTPEVTCVVVDVSHEDPEVKFNWYVDGVEVHNAKTKPREEQYNSTYRVVSVLTVLHQDWLNGKEYKCKVSNKALPAPIEKTISKAKGQPREPQVYTLPPSREEMTKNQVSLTCLVKGFYPSDIAVEWESNGQPENNYKTTPPVLDSDGSFFLTSKLTVDKSRWQQGNVFSCSVMHEALHNHYTQKSLSLSPGK

SEQ ID NO: 99 - protein, 611 aa, Artificial Sequence
  Description of Artificial Sequence: Synthetic polypeptide
ASLPYLQKESVFQSGAHAYRIPALLYLPGQQSLLAFAEQRASKKDEHAELIVLRRGDYDAPTHQVQWQAQEVVAQARLDGHRSMNPCPLYDAQTGTLFLFFIAIPGQVTEQQQLQTRANVTRLCQVTSTDHGRTWSSPRDLTDAAIGPAYREWSTFAVGPGHCLQLHDRARSLVVPAYAYRKLHPKQRPIPSAFCFLSHDHGRTWARGHFVAQDTLECQVAEVETGEQRVVTLNARSHLRARVQAQSTNDGLDFQESQLVKKLVEPPPQGCQGSVISFPSPRSGPGSPAQWLLYTHPTHSWQRADLGAYLNPRPPAPEAWSEPVLLAKGSAAYSDLQSMGTGPDGSPLFGCLYEANDYEEIVFLMFTLKQAFPAEYLPQEPKSSDKTHTCPPCPAPELLGGPSVFLFPPKPKDTLMISRTPEVTCVVVDVSHEDPEVKFNWYVDGVEVHNAKTKPREEQYNSTYRVVSVLTVLHQDWLNGKEYKCKVSNKALPAPIEKTISKAKGQPREPQVYTLPPSREEMTKNQVSLTCLVKGFYPSDIAVEWESNGQPENNYKTTPPVLDSDGSFFLTSKLTVDKSRWQQGNVFSCSVMHEALHNHYTQKSLSLSPGK

SEQ ID NO: 100 - protein, 612 aa, Artificial Sequence
  Description of Artificial Sequence: Synthetic polypeptide
AASLPYLQKESVFQSGAHAYRIPALLYLPGQQSLLAFAEQRASKKDEHAELIVLRRGDYDAPTHQVQWQAQEVVAQARLDGHRSMNPCPLYDAQTGTLFLFFIAIPGQVTEQQQLQTRANVTRLCQVTSTDHGRTWSSPRDLTDAAIGPAYREWSTFAVGPGHCLQLHDRARSLVVPAYAYRKLHPKQRPIPSAFCFLSHDHGRTWARGHFVAQDTLECQVAEVETGEQRVVTLNARSHLRARVQAQSTNDGLDFQESQLVKKLVEPPPQGCQGSVISFPSPRSGPGSPAQWLLYTHPTHSWQRADLGAYLNPRPPAPEAWSEPVLLAKGSAAYSDLQSMGTGPDGSPLFGCLYEANDYEEIVFLMFTLKQAFPAEYLPQEPKSSDKTHTCPPCPAPELLGGPSVFLFPPKPKDTLMISRTPEVTCVVVDVSHEDPEVKFNWYVDGVEVHNAKTKPREEQYNSTYRVVSVLTVLHQDWLNGKEYKCKVSNKALPAPIEKTISKAKGQPREPQVYTLPPSREEMTKNQVSLTCLVKGFYPSDIAVEWESNGQPENNYKTTPPVLDSDGSFFLTSKLTVDKSRWQQGNVFSCSVMHEALHNHYTQKSLSLSPGK

SEQ ID NO: 101 - protein, 612 aa, Artificial Sequence
  Description of Artificial Sequence: Synthetic polypeptide
DASLPYLQKESVFQSGAHAYRIPALLYLPGQQSLLAFAEQRASKKDEHAELIVLRRGDYDAPTHQVQWQAQEVVAQARLDGHRSMNPCPLYDAQTGTLFLFFIAIPGQVTEQQQLQTRANVTRLCQVTSTDHGRTWSSPRDLTDAAIGPAYREWSTFAVGPGHCLQLHDRARSLVVPAYAYRKLHPKQRPIPSAFCFLSHDHGRTWARGHFVAQDTLECQVAEVETGEQRVVTLNARSHLRARVQAQSTNDGLDFQESQLVKKLVEPPPQGCQGSVISFPSPRSGPGSPAQWLLYTHPTHSWQRADLGAYLNPRPPAPEAWSEPVLLAKGSAAYSDLQSMGTGPDGSPLFGCLYEANDYEEIVFLMFTLKQAFPAEYLPQEPKSSDKTHTCPPCPAPELLGGPSVFLFPPKPKDTLMISRTPEVTCVVVDVSHEDPEVKFNWYVDGVEVHNAKTKPREEQYNSTYRVVSVLTVLHQDWLNGKEYKCKVSNKALPAPIEKTISKAKGQPREPQVYTLPPSREEMTKNQVSLTCLVKGFYPSDIAVEWESNGQPENNYKTTPPVLDSDGSFFLTSKLTVDKSRWQQGNVFSCSVMHEALHNHYTQKSLSLSPGK

SEQ ID NO: 102 - protein, 612 aa, Artificial Sequence
  Description of Artificial Sequence: Synthetic polypeptide
AASLPYLQKESVFQSGAHAYRIPALLYLPGQQSLLAFAEQRASKKDEHAELIVLRRGDYDAPTHQVQWQAQEVVAQARLDGHRSMNPCPLYDAQTGTLFLFFIAIPGQVTEQQQLQTRANVTRLCQVTSTDHGRTWSSPRDLTDAAIGPAYREWSTFAVGPGHCLQLHDRARSLVVPAYAYRKLHPKQRPIPSAFCFLSHDHGRTWARGHFVAQDTLECQVAEVETGEQRVVTLNARSHLRARVQAQSTNDGLDFQESQLVKKLVEPPPQGCQGSVISFPSPRSGPGSPAQWLLYTHPTHSWQRADLGAYLNPRPPAPEAWSEPVLLAKGSCAYSDLQSMGTGPDGSPLFGCLYEANDYEEIVFLMFTLKQAFPAEYLPQEPKSSDKTHTCPPCPAPELLGGPSVFLFPPKPKDTLMISRTPEVTCVVVDVSHEDPEVKFNWYVDGVEVHNAKTKPREEQYNSTYRVVSVLTVLHQDWLNGKEYKCKVSNKALPAPIEKTISKAKGQPREPQVYTLPPSREEMTKNQVSLTCLVKGFYPSDIAVEWESNGQPENNYKTTPPVLDSDGSFFLTSKLTVDKSRWQQGNVFSCSVMHEALHNHYTQKSLSLSPGK

SEQ ID NO: 103 - protein, 612 aa, Artificial Sequence
  Description of Artificial Sequence: Synthetic polypeptide
DASLPYLQKESVFQSGAHAYRIPALLYLPGQQSLLAFAEQRASKKDEHAELIVLRRGDYDAPTHQVQWQAQEVVAQARLDGHRSMNPCPLYDAQTGTLFLFFIAIPGQVTEQQQLQTRANVTRLCQVTSTDHGRTWSSPRDLTDAAIGPAYREWSTFAVGPGHCLQLHDRARSLVVPAYAYRKLHPKQRPIPSAFCFLSHDHGRTWARGHFVAQDTLECQVAEVETGEQRVVTLNARSHLRARVQAQSTNDGLDFQESQLVKKLVEPPPQGCQGSVISFPSPRSGPGSPAQWLLYTHPTHSWQRADLGAYLNPRPPAPEAWSEPVLLAKGSCAYSDLQSMGTGPDGSPLFGCLYEANDYEEIVFLMFTLKQAFPAEYLPQEPKSSDKTHTCPPCPAPELLGGPSVFLFPPKPKDTLMISRTPEVTCVVVDVSHEDPEVKFNWYVDGVEVHNAKTKPREEQYNSTYRVVSVLTVLHQDWLNGKEYKCKVSNKALPAPIEKTISKAKGQPREPQVYTLPPSREEMTKNQVSLTCLVKGFYPSDIAVEWESNGQPENNYKTTPPVLDSDGSFFLTSKLTVDKSRWQQGNVFSCSVMHEALHNHYTQKSLSLSPGK

SEQ ID NO: 104 - protein, 612 aa, Artificial Sequence
  Description of Artificial Sequence: Synthetic polypeptide
MASLPYLQKESVFQSGAHAYRIPALLYLPGQQSLLAFAEQRASKKDEHAELIVLRRGDYDAPTHQVQWQAQEVVAQARLDGHRSMNPCPLYDAQTGTLFLFFIAIPGQVTEQQQLQTRANVTRLCQVTSTDHGRTWSSPRDLTDAAIGPAYREWSTFAVGPGHCLQLHDRARSLVVPAYAYRKLHPKQRPIPSAFCFLSHDHGRTWARGHFVAQDTLECQVAEVETGEQRVVTLNARSHLRARVQAQSTNDGLDFQESQLVKKLVEPPPQGCQGSVISFPSPRSGPGSPAQWLLYTHPTHSWQRADLGAYLNPRPPAPEAWSEPVLLAKGSCAYSDLQSMGTGPDGSPLFGCLYEANDYEEIVFLMFTLKQAFPAEYLPQEPKSSDKTHTCPPCPAPELLGGPSVFLFPPKPKDTLMISRTPEVTCVVVDVSHEDPEVKFNWYVDGVEVHNAKTKPREEQYNSTYRVVSVLTVLHQDWLNGKEYKCKVSNKALPAPIEKTISKAKGQPREPQVYTLPPSREEMTKNQVSLTCLVKGFYPSDIAVEWESNGQPENNYKTTPPVLDSDGSFFLTSKLTVDKSRWQQGNVFSCSVMHEALHNHYTQKSLSLSPGK

SEQ ID NO: 105 - protein, 612 aa, Artificial Sequence
  Description of Artificial Sequence: Synthetic polypeptide
MASLPYLQKESVFQSGAHAYRIPALLYLPGQQSLLAFAEQRASKKDEHAELIVLRRGDYDAPTHQVQWQAQEVVAQARLDGHRSMNPCPLYDAQTGTLFLFFIAIPGQVTEQQQLQTRANVTRLCQVTSTDHGRTWSSPRDLTDAAIGPAYREWSTFAVGPGHCLQLHDRARSLVVPAYAYRKLHPKQRPIPSAFCFLSHDHGRTWARGHFVAQDTLECQVAEVETGEQRVVTLNARSHLRARVQAQSTNDGLDFQESQLVKKLVEPPPQGCQGSVISFPSPRSGPGSPAQWLLYTHPTHSWQRADLGAYLNPRPPAPEAWSEPVLLAKGSAAYSDLQSMGTGPDGSPLFGCLYEANDYEEIVFLMFTLKQAFPAEYLPQEPKSSDKTHTCPPCPAPELLGGPSVFLFPPKPKDTLMISRTPEVTCVVVDVSHEDPEVKFNWYVDGVEVHNAKTKPREEQYNSTYRVVSVLTVLHQDWLNGKEYKCKVSNKALPAPIEKTISKAKGQPREPQVYTLPPSREEMTKNQVSLTCLVKGFYPSDIAVEWESNGQPENNYKTTPPVLDSDGSFFLTSKLTVDKSRWQQGNVFSCSVMHEALHNHYTQKSLSLSPGK

SEQ ID NO: 106 - protein, 612 aa, Artificial Sequence
  Description of Artificial Sequence: Synthetic polypeptide
DASLPYLQKESVFQSGAHAYRIPALLYLPGQQSLLAFAEQRASKKDEHAELIVLRRGDYDAGTHQVQWQAQEVVAQARLDGHRSMNPCPLYDEQTGTLFLFFIAIPGQVTEQQQLQTRANVTRLCQVTSTDHGRTWSSPRDLTDAAIGPAYREWSTFAVGPGHCLQLHDRARSLVVPAYAYRKLHPKQRPIPSAFCFLSHDHGRTWARGHFVAQDTLECQVAEVETGEQRVVTLNARSHLRARVQAQSTNDGLDFQESQLVKKLVEPPPQGCQGSVISFPSPRSGPGSPAQWLLYTHPTHSWQRADLGAYLNPRPPAPEAWSEPVLLAKGSAAYSDLQSMGTGPDGSPLFGCLYEANDYEEIVFLMFTLKQAFPAEYLPQEPKSSDKTHTCPPCPAPELLGGPSVFLFPPKPKDTLMISRTPEVTCVVVDVSHEDPEVKFNWYVDGVEVHNAKTKPREEQYNSTYRVVSVLTVLHQDWLNGKEYKCKVSNKALPAPIEKTISKAKGQPREPQVYTLPPSREEMTKNQVSLTCLVKGFYPSDIAVEWESNGQPENNYKTTPPVLDSDGSFFLTSKLTVDKSRWQQGNVFSCSVMHEALHNHYTQKSLSLSPGK

SEQ ID NO: 107 - protein, 612 aa, Artificial Sequence
  Description of Artificial Sequence: Synthetic polypeptide
DASLPYLQDESVFQSGAHAYRIPALLYLPGQQSLLAFAEQRASKKDEHAELIVLRRGDYDAPTHQVQWQAQEVVAQARLDGHRSMNPCPLYDEQTGTLFLFFIAIPGQVTEQQQLQTRANVTRLCQVTSTDHGRTWSSPRDLTDAAIGPAYREWSTFAVGPGHCLQLHDRARSLVVPAYAYRKLHPKQRPIPSAFCFLSHDHGRTWARGHFVAQDTLECQVAEVETGEQRVVTLNARSHLRARVQAQSTNDGLDFQESQLVKKLVEPPPQGCQGSVISFPSPRSGPGSPAQWLLYTHPTHSWQRADLGAYLNPRPPAPEAWSEPVLLAKGSAAYSDLQSMGTGPDGSPLFGCLYEANDYEEIRFIMFTLKQAFPAEYLPQEPKSSDKTHTCPPCPAPELLGGPSVFLFPPKPKDTLMISRTPEVTCVVVDVSHEDPEVKFNWYVDGVEVHNAKTKPREEQYNSTYRVVSVLTVLHQDWLNGKEYKCKVSNKALPAPIEKTISKAKGQPREPQVYTLPPSREEMTKNQVSLTCLVKGFYPSDIAVEWESNGQPENNYKTTPPVLDSDGSFFLTSKLTVDKSRWQQGNVFSCSVMHEALHNHYTQKSLSLSPGK

SEQ ID NO: 108 - protein, 612 aa, Artificial Sequence
  Description of Artificial Sequence: Synthetic polypeptide
DASLPYLQKESVFQSGAHAYRIPALLYLPGQQSLLAFAEQRASKKDEHAELIVLRRGDYDANTHQVQWQAQEVVAQARLDGHRSMNPCPLYDAQTGTLFLFFIAIPGQVTEQQQLQTRANVTRLCQVTSTDHGRTWSSPRDLTDAAIGPAYREWSTFAVGPGHCLQLHDRARSLVVPAYAYRKLHPKQRPIPSAFCFLSHDHGRTWARGHFVAQDTLECQVAEVETGEQRVVTLNARSHLRARVQAQSTNDGLDFQESQLVKKLVEPPPQGCQGSVISFPSPRSGPGSPAQWLLYTHPTHSWQRADLGAYLNPRPPAPEAWSEPVLLAKGSAAYSDLQSMGTGPDGSPLFGCLYEANDYEEIVFLMFTLKQAFPAEYLPQEPKSSDKTHTCPPCPAPELLGGPSVFLFPPKPKDTLMISRTPEVTCVVVDVSHEDPEVKFNWYVDGVEVHNAKTKPREEQYNSTYRVVSVLTVLHQDWLNGKEYKCKVSNKALPAPIEKTISKAKGQPREPQVYTLPPSREEMTKNQVSLTCLVKGFYPSDIAVEWESNGQPENNYKTTPPVLDSDGSFFLTSKLTVDKSRWQQGNVFSCSVMHEALHNHYTQKSLSLSPGK

SEQ ID NO: 109 - protein, 612 aa, Artificial Sequence
  Description of Artificial Sequence: Synthetic polypeptide
DASLPYLQKESVFQSGAHAYRIPALLYLPGQQSLLAFAEQRASKKDEHAELIVLRRGDYDAPTHQVQWQAQEVVAQARLDGHRSMNPCPLYDAQTGTLFLFFIAIPGQVTEQQQLQTRANVTRLCQVTSTDHGRTWSSPRDLTDAAIGPAYREWSTFAVGPGHCLQLHDRARSLVVPAYAYRKLHPKQRPIPSAFCFLSHDHGRTWARGHFVAQDTLECQVAEVETGEQRVVTLNARSHLRARVQAQSTNDGLDFQESQLVKKLVEPPPAGCQGSVISFPSPRSGPGSPAQWLLYTHPTHRKQRADLGAYLNPRPPAPEAWSEPVLLAKGSAAYSDLQSMGTGPDGSPLFGCLYEANDYEEIVFLMFTLKQAFPAEYLPQEPKSSDKTHTCPPCPAPELLGGPSVFLFPPKPKDTLMISRTPEVTCVVVDVSHEDPEVKFNWYVDGVEVHNAKTKPREEQYNSTYRVVSVLTVLHQDWLNGKEYKCKVSNKALPAPIEKTISKAKGQPREPQVYTLPPSREEMTKNQVSLTCLVKGFYPSDIAVEWESNGQPENNYKTTPPVLDSDGSFFLTSKLTVDKSRWQQGNVFSCSVMHEALHNHYTQKSLSLSPGK

SEQ ID NO: 110 - protein, 612 aa, Artificial Sequence
  Description of Artificial Sequence: Synthetic polypeptide
DASLPYLQKESVFQSGAHAYRIPALLYLPGQQSLLAFAEQRASKKDEHAELIVLRRGDYDASTHQVQWQAQEVVAQARLDGHRSMNPCPLYDAQTGTLFLFFIAIPGQVTEQQQLQTRANVTRLCQVTSTDHGRTWSSPRDLTDAAIGPAYREWSTFAVGPGHCLQLHDRARSLVVPAYAYRKLHPKQRPIPSAFCFLSHDHGRTWARGHFVAQDTLECQVAEVETGEQRVVTLNARSHLRARVQAQSTNDGLDFQESQLVKKLVEPPPAGCQGSVISFPSPRSGPGSPAQWLLYTHPTHRKQRADLGAYLNPRPPAPEAWSEPVLLAKGSAAYSDLQSMGTGPDGSPLFGCLYEANDYEEIVFLMFTLKQAFPAEYLPQEPKSSDKTHTCPPCPAPELLGGPSVFLFPPKPKDTLMISRTPEVTCVVVDVSHEDPEVKFNWYVDGVEVHNAKTKPREEQYNSTYRVVSVLTVLHQDWLNGKEYKCKVSNKALPAPIEKTISKAKGQPREPQVYTLPPSREEMTKNQVSLTCLVKGFYPSDIAVEWESNGQPENNYKTTPPVLDSDGSFFLTSKLTVDKSRWQQGNVFSCSVMHEALHNHYTQKSLSLSPGK

SEQ ID NO: 111 - protein, 612 aa, Artificial Sequence
  Description of Artificial Sequence: Synthetic polypeptide
DASLPYLQKESVFQSGAHAYRIPALLYLPGQQSLLAFAEQRASKKDEHAELIVLRRGDYDATTHQVQWQAQEVVAQARLDGHRSMNPCPLYDAQTGTLFLFFIAIPGQVTEQQQLQTRANVTRLCQVTSTDHGRTWSSPRDLTDAAIGPAYREWSTFAVGPGHCLQLHDRARSLVVPAYAYRKLHPKQRPIPSAFCFLSHDHGRTWARGHFVAQDTLECQVAEVETGEQRVVTLNARSHLRARVQAQSTNDGLDFQESQLVKKLVEPPPAGCQGSVISFPSPRSGPGSPAQWLLYTHPTHRKQRADLGAYLNPRPPAPEAWSEPVLLAKGSAAYSDLQSMGTGPDGSPLFGCLYEANDYEEIVFLMFTLKQAFPAEYLPQEPKSSDKTHTCPPCPAPELLGGPSVFLFPPKPKDTLMISRTPEVTCVVVDVSHEDPEVKFNWYVDGVEVHNAKTKPREEQYNSTYRVVSVLTVLHQDWLNGKEYKCKVSNKALPAPIEKTISKAKGQPREPQVYTLPPSREEMTKNQVSLTCLVKGFYPSDIAVEWESNGQPENNYKTTPPVLDSDGSFFLTSKLTVDKSRWQQGNVFSCSVMHEALHNHYTQKSLSLSPGK

SEQ ID NO: 112 - protein, 612 aa, Artificial Sequence
  Description of Artificial Sequence: Synthetic polypeptide
DASLPYLQKESVFQSGAHAYRIPALLYLPGQQSLLAFAEQRASKKDEHAELIVLRRGDYDANTHQVQWQAQEVVAQARLDGHRSMNPCPLYDAQTGTLFLFFIAIPGQVTEQQQLQTRANVTRLCQVTSTDHGRTWSSPRDLTDAAIGPAYREWSTFAVGPGHCLQLHDRARSLVVPAYAYRKLHPKQRPIPSAFCFLSHDHGRTWARGHFVAQDTLECQVAEVETGEQRVVTLNARSHLRARVQAQSTNDGLDFQESQLVKKLVEPPPAGCQGSVISFPSPRSGPGSPAQWLLYTHPTHRKQRADLGAYLNPRPPAPEAWSEPVLLAKGSAAYSDLQSMGTGPDGSPLFGCLYEANDYEEIVFLMFTLKQAFPAEYLPQEPKSSDKTHTCPPCPAPELLGGPSVFLFPPKPKDTLMISRTPEVTCVVVDVSHEDPEVKFNWYVDGVEVHNAKTKPREEQYNSTYRVVSVLTVLHQDWLNGKEYKCKVSNKALPAPIEKTISKAKGQPREPQVYTLPPSREEMTKNQVSLTCLVKGFYPSDIAVEWESNGQPENNYKTTPPVLDSDGSFFLTSKLTVDKSRWQQGNVFSCSVMHEALHNHYTQKSLSLSPGK

SEQ ID NO: 113 - protein, 616 aa, Artificial Sequence
  Description of Artificial Sequence: Synthetic polypeptide
ASLPYLQKESVFQSGAHAYRIPALLYLPGQQSLLAFAEQRASKKDEHAELIVLRRGDYDAPTHQVQWQAQEVVAQARLDGHRSMNPCPLYDAQTGTLFLFFIAIPGQVTEQQQLQTRANVTRLCQVTSTDHGRTWSSPRDLTDAAIGPAYREWSTFAVGPGHCLQLHDRARSLVVPAYAYRKLHPKQRPIPSAFCFLSHDHGRTWARGHFVAQDTLECQVAEVETGEQRVVTLNARSHLRARVQAQSTNDGLDFQESQLVKKLVEPPPQGCQGSVISFPSPRSGPGSPAQWLLYTHPTHSWQRADLGAYLNPRPPAPEAWSEPVLLAKGSCAYSDLQSMGTGPDGSPLFGCLYEANDYEEIVFLMFTLKQAFPAEYLPQGGGGSGGGGSDKTHTCPPCPAPELLGGPSVFLFPPKPKDTLMISRTPEVTCVVVDVSHEDPEVKFNWYVDGVEVHNAKTKPREEQYNSTYRVVSVLTVLHQDWLNGKEYKCKVSNKALPAPIEKTISKAKGQPREPQVYTLPPSREEMTKNQVSLTCLVKGFYPSDIAVEWESNGQPENNYKTTPPVLDSDGSFFLYSKLTVDKSRWQQGNVFSCSVMHEALHNHYTQKSLSLSPGK

SEQ ID NO: 114 - protein, 616 aa, Artificial Sequence
  Description of Artificial Sequence: Synthetic polypeptide
ASLPYLQKESVFQSGAHAYRIPALLYLPGQQSLLAFAEQRASKKDEHAELIVLRRGDYDAPTHQVQWQAQEVVAQARLDGHRSMNPCPLYDAQTGTLFLFFIAIPGQVTEQQQLQTRANVTRLCQVTSTDHGRTWSSPRDLTDAAIGPAYREWSTFAVGPGHCLQLHDRARSLVVPAYAYRKLHPKQRPIPSAFCFLSHDHGRTWARGHFVAQDTLECQVAEVETGEQRVVTLNARSHLRARVQAQSTNDGLDFQESQLVKKLVEPPPQGCQGSVISFPSPRSGPGSPAQWLLYTHPTHSWQRADLGAYLNPRPPAPEAWSEPVLLAKGSAAYSDLQSMGTGPDGSPLFGCLYEANDYEEIVFLMFTLKQAFPAEYLPQGGGGSGGGGSDKTHTCPPCPAPELLGGPSVFLFPPKPKDTLMISRTPEVTCVVVDVSHEDPEVKFNWYVDGVEVHNAKTKPREEQYNSTYRVVSVLTVLHQDWLNGKEYKCKVSNKALPAPIEKTISKAKGQPREPQVYTLPPSREEMTKNQVSLTCLVKGFYPSDIAVEWESNGQPENNYKTTPPVLDSDGSFFLYSKLTVDKSRWQQGNVFSCSVMHEALHNHYTQKSLSLSPGK

SEQ ID NO: 115 - protein, 617 aa, Artificial Sequence
  Description of Artificial Sequence: Synthetic polypeptide
AASLPYLQKESVFQSGAHAYRIPALLYLPGQQSLLAFAEQRASKKDEHAELIVLRRGDYDAPTHQVQWQAQEVVAQARLDGHRSMNPCPLYDAQTGTLFLFFIAIPGQVTEQQQLQTRANVTRLCQVTSTDHGRTWSSPRDLTDAAIGPAYREWSTFAVGPGHCLQLHDRARSLVVPAYAYRKLHPKQRPIPSAFCFLSHDHGRTWARGHFVAQDTLECQVAEVETGEQRVVTLNARSHLRARVQAQSTNDGLDFQESQLVKKLVEPPPQGCQGSVISFPSPRSGPGSPAQWLLYTHPTHSWQRADLGAYLNPRPPAPEAWSEPVLLAKGSAAYSDLQSMGTGPDGSPLFGCLYEANDYEEIVFLMFTLKQAFPAEYLPQGGGGSGGGGSDKTHTCPPCPAPELLGGPSVFLFPPKPKDTLMISRTPEVTCVVVDVSHEDPEVKFNWYVDGVEVHNAKTKPREEQYNSTYRVVSVLTVLHQDWLNGKEYKCKVSNKALPAPIEKTISKAKGQPREPQVYTLPPSREEMTKNQVSLTCLVKGFYPSDIAVEWESNGQPENNYKTTPPVLDSDGSFFLYSKLTVDKSRWQQGNVFSCSVMHEALHNHYTQKSLSLSPGK

SEQ ID NO: 116 - protein, 617 aa, Artificial Sequence
  Description of Artificial Sequence: Synthetic polypeptide
DASLPYLQKESVFQSGAHAYRIPALLYLPGQQSLLAFAEQRASKKDEHAELIVLRRGDYDAPTHQVQWQAQEVVAQARLDGHRSMNPCPLYDAQTGTLFLFFIAIPGQVTEQQQLQTRANVTRLCQVTSTDHGRTWSSPRDLTDAAIGPAYREWSTFAVGPGHCLQLHDRARSLVVPAYAYRKLHPKQRPIPSAFCFLSHDHGRTWARGHFVAQDTLECQVAEVETGEQRVVTLNARSHLRARVQAQSTNDGLDFQESQLVKKLVEPPPQGCQGSVISFPSPRSGPGSPAQWLLYTHPTHSWQRADLGAYLNPRPPAPEAWSEPVLLAKGSAAYSDLQSMGTGPDGSPLFGCLYEANDYEEIVFLMFTLKQAFPAEYLPQGGGGSGGGGSDKTHTCPPCPAPELLGGPSVFLFPPKPKDTLMISRTPEVTCVVVDVSHEDPEVKFNWYVDGVEVHNAKTKPREEQYNSTYRVVSVLTVLHQDWLNGKEYKCKVSNKALPAPIEKTISKAKGQPREPQVYTLPPSREEMTKNQVSLTCLVKGFYPSDIAVEWESNGQPENNYKTTPPVLDSDGSFFLYSKLTVDKSRWQQGNVFSCSVMHEALHNHYTQKSLSLSPGK

SEQ ID NO: 117 - protein, 617 aa, Artificial Sequence
  Description of Artificial Sequence: Synthetic polypeptide
AASLPYLQKESVFQSGAHAYRIPALLYLPGQQSLLAFAEQRASKKDEHAELIVLRRGDYDAPTHQVQWQAQEVVAQARLDGHRSMNPCPLYDAQTGTLFLFFIAIPGQVTEQQQLQTRANVTRLCQVTSTDHGRTWSSPRDLTDAAIGPAYREWSTFAVGPGHCLQLHDRARSLVVPAYAYRKLHPKQRPIPSAFCFLSHDHGRTWARGHFVAQDTLECQVAEVETGEQRVVTLNARSHLRARVQAQSTNDGLDFQESQLVKKLVEPPPQGCQGSVISFPSPRSGPGSPAQWLLYTHPTHSWQRADLGAYLNPRPPAPEAWSEPVLLAKGSCAYSDLQSMGTGPDGSPLFGCLYEANDYEEIVFLMFTLKQAFPAEYLPQGGGGSGGGGSDKTHTCPPCPAPELLGGPSVFLFPPKPKDTLMISRTPEVTCVVVDVSHEDPEVKFNWYVDGVEVHNAKTKPREEQYNSTYRVVSVLTVLHQDWLNGKEYKCKVSNKALPAPIEKTISKAKGQPREPQVYTLPPSREEMTKNQVSLTCLVKGFYPSDIAVEWESNGQPENNYKTTPPVLDSDGSFFLYSKLTVDKSRWQQGNVFSCSVMHEALHNHYTQKSLSLSPGK

SEQ ID NO: 118 - protein, 617 aa, Artificial Sequence
  Description of Artificial Sequence: Synthetic polypeptide
DASLPYLQKESVFQSGAHAYRIPALLYLPGQQSLLAFAEQRASKKDEHAELIVLRRGDYDAPTHQVQWQAQEVVAQARLDGHRSMNPCPLYDAQTGTLFLFFIAIPGQVTEQQQLQTRANVTRLCQVTSTDHGRTWSSPRDLTDAAIGPAYREWSTFAVGPGHCLQLHDRARSLVVPAYAYRKLHPKQRPIPSAFCFLSHDHGRTWARGHFVAQDTLECQVAEVETGEQRVVTLNARSHLRARVQAQSTNDGLDFQESQLVKKLVEPPPQGCQGSVISFPSPRSGPGSPAQWLLYTHPTHSWQRADLGAYLNPRPPAPEAWSEPVLLAKGSCAYSDLQSMGTGPDGSPLFGCLYEANDYEEIVFLMFTLKQAFPAEYLPQGGGGSGGGGSDKTHTCPPCPAPELLGGPSVFLFPPKPKDTLMISRTPEVTCVVVDVSHEDPEVKFNWYVDGVEVHNAKTKPREEQYNSTYRVVSVLTVLHQDWLNGKEYKCKVSNKALPAPIEKTISKAKGQPREPQVYTLPPSREEMTKNQVSLTCLVKGFYPSDIAVEWESNGQPENNYKTTPPVLDSDGSFFLYSKLTVDKSRWQQGNVFSCSVMHEALHNHYTQKSLSLSPGK

SEQ ID NO: 119 - protein, 617 aa, Artificial Sequence
  Description of Artificial Sequence: Synthetic polypeptide
MASLPYLQKESVFQSGAHAYRIPALLYLPGQQSLLAFAEQRASKKDEHAELIVLRRGDYDAPTHQVQWQAQEVVAQARLDGHRSMNPCPLYDAQTGTLFLFFIAIPGQVTEQQQLQTRANVTRLCQVTSTDHGRTWSSPRDLTDAAIGPAYREWSTFAVGPGHCLQLHDRARSLVVPAYAYRKLHPKQRPIPSAFCFLSHDHGRTWARGHFVAQDTLECQVAEVETGEQRVVTLNARSHLRARVQAQSTNDGLDFQESQLVKKLVEPPPQGCQGSVISFPSPRSGPGSPAQWLLYTHPTHSWQRADLGAYLNPRPPAPEAWSEPVLLAKGSCAYSDLQSMGTGPDGSPLFGCLYEANDYEEIVFLMFTLKQAFPAEYLPQGGGGSGGGGSDKTHTCPPCPAPELLGGPSVFLFPPKPKDTLMISRTPEVTCVVVDVSHEDPEVKFNWYVDGVEVHNAKTKPREEQYNSTYRVVSVLTVLHQDWLNGKEYKCKVSNKALPAPIEKTISKAKGQPREPQVYTLPPSREEMTKNQVSLTCLVKGFYPSDIAVEWESNGQPENNYKTTPPVLDSDGSFFLYSKLTVDKSRWQQGNVFSCSVMHEALHNHYTQKSLSLSPGK

SEQ ID NO: 120 - protein, 617 aa, Artificial Sequence
  Description of Artificial Sequence: Synthetic polypeptide
MASLPYLQKESVFQSGAHAYRIPALLYLPGQQSLLAFAEQRASKKDEHAELIVLRRGDYDAPTHQVQWQAQEVVAQARLDGHRSMNPCPLYDAQTGTLFLFFIAIPGQVTEQQQLQTRANVTRLCQVTSTDHGRTWSSPRDLTDAAIGPAYREWSTFAVGPGHCLQLHDRARSLVVPAYAYRKLHPKQRPIPSAFCFLSHDHGRTWARGHFVAQDTLECQVAEVETGEQRVVTLNARSHLRARVQAQSTNDGLDFQESQLVKKLVEPPPQGCQGSVISFPSPRSGPGSPAQWLLYTHPTHSWQRADLGAYLNPRPPAPEAWSEPVLLAKGSAAYSDLQSMGTGPDGSPLFGCLYEANDYEEIVFLMFTLKQAFPAEYLPQGGGGSGGGGSDKTHTCPPCPAPELLGGPSVFLFPPKPKDTLMISRTPEVTCVVVDVSHEDPEVKFNWYVDGVEVHNAKTKPREEQYNSTYRVVSVLTVLHQDWLNGKEYKCKVSNKALPAPIEKTISKAKGQPREPQVYTLPPSREEMTKNQVSLTCLVKGFYPSDIAVEWESNGQPENNYKTTPPVLDSDGSFFLYSKLTVDKSRWQQGNVFSCSVMHEALHNHYTQKSLSLSPGK

SEQ ID NO: 121 - protein, 617 aa, Artificial Sequence
  Description of Artificial Sequence: Synthetic polypeptide
DASLPYLQKESVFQSGAHAYRIPALLYLPGQQSLLAFAEQRASKKDEHAELIVLRRGDYDAGTHQVQWQAQEVVAQARLDGHRSMNPCPLYDEQTGTLFLFFIAIPGQVTEQQQLQTRANVTRLCQVTSTDHGRTWSSPRDLTDAAIGPAYREWSTFAVGPGHCLQLHDRARSLVVPAYAYRKLHPKQRPIPSAFCFLSHDHGRTWARGHFVAQDTLECQVAEVETGEQRVVTLNARSHLRARVQAQSTNDGLDFQESQLVKKLVEPPPQGCQGSVISFPSPRSGPGSPAQWLLYTHPTHSWQRADLGAYLNPRPPAPEAWSEPVLLAKGSAAYSDLQSMGTGPDGSPLFGCLYEANDYEEIVFLMFTLKQAFPAEYLPQGGGGSGGGGSDKTHTCPPCPAPELLGGPSVFLFPPKPKDTLMISRTPEVTCVVVDVSHEDPEVKFNWYVDGVEVHNAKTKPREEQYNSTYRVVSVLTVLHQDWLNGKEYKCKVSNKALPAPIEKTISKAKGQPREPQVYTLPPSREEMTKNQVSLTCLVKGFYPSDIAVEWESNGQPENNYKTTPPVLDSDGSFFLYSKLTVDKSRWQQGNVFSCSVMHEALHNHYTQKSLSLSPGK

SEQ ID NO: 122 - protein, 617 aa, Artificial Sequence
  Description of Artificial Sequence: Synthetic polypeptide
DASLPYLQDESVFQSGAHAYRIPALLYLPGQQSLLAFAEQRASKKDEHAELIVLRRGDYDAPTHQVQWQAQEVVAQARLDGHRSMNPCPLYDEQTGTLFLFFIAIPGQVTEQQQLQTRANVTRLCQVTSTDHGRTWSSPRDLTDAAIGPAYREWSTFAVGPGHCLQLHDRARSLVVPAYAYRKLHPKQRPIPSAFCFLSHDHGRTWARGHFVAQDTLECQVAEVETGEQRVVTLNARSHLRARVQAQSTNDGLDFQESQLVKKLVEPPPQGCQGSVISFPSPRSGPGSPAQWLLYTHPTHSWQRADLGAYLNPRPPAPEAWSEPVLLAKGSAAYSDLQSMGTGPDGSPLFGCLYEANDYEEIRFIMFTLKQAFPAEYLPQGGGGSGGGGSDKTHTCPPCPAPELLGGPSVFLFPPKPKDTLMISRTPEVTCVVVDVSHEDPEVKFNWYVDGVEVHNAKTKPREEQYNSTYRVVSVLTVLHQDWLNGKEYKCKVSNKALPAPIEKTISKAKGQPREPQVYTLPPSREEMTKNQVSLTCLVKGFYPSDIAVEWESNGQPENNYKTTPPVLDSDGSFFLYSKLTVDKSRWQQGNVFSCSVMHEALHNHYTQKSLSLSPGK

SEQ ID NO: 123 - protein, 617 aa, Artificial Sequence
  Description of Artificial Sequence: Synthetic polypeptide
DASLPYLQKESVFQSGAHAYRIPALLYLPGQQSLLAFAEQRASKKDEHAELIVLRRGDYDANTHQVQWQAQEVVAQARLDGHRSMNPCPLYDAQTGTLFLFFIAIPGQVTEQQQLQTRANVTRLCQVTSTDHGRTWSSPRDLTDAAIGPAYREWSTFAVGPGHCLQLHDRARSLVVPAYAYRKLHPKQRPIPSAFCFLSHDHGRTWARGHFVAQDTLECQVAEVETGEQRVVTLNARSHLRARVQAQSTNDGLDFQESQLVKKLVEPPPQGCQGSVISFPSPRSGPGSPAQWLLYTHPTHSWQRADLGAYLNPRPPAPEAWSEPVLLAKGSAAYSDLQSMGTGPDGSPLFGCLYEANDYEEIVFLMFTLKQAFPAEYLPQGGGGSGGGGSDKTHTCPPCPAPELLGGPSVFLFPPKPKDTLMISRTPEVTCVVVDVSHEDPEVKFNWYVDGVEVHNAKTKPREEQYNSTYRVVSVLTVLHQDWLNGKEYKCKVSNKALPAPIEKTISKAKGQPREPQVYTLPPSREEMTKNQVSLTCLVKGFYPSDIAVEWESNGQPENNYKTTPPVLDSDGSFFLYSKLTVDKSRWQQGNVFSCSVMHEALHNHYTQKSLSLSPGK

SEQ ID NO: 124 - protein, 617 aa, Artificial Sequence
  Description of Artificial Sequence: Synthetic polypeptide
DASLPYLQKESVFQSGAHAYRIPALLYLPGQQSLLAFAEQRASKKDEHAELIVLRRGDYDAPTHQVQWQAQEVVAQARLDGHRSMNPCPLYDAQTGTLFLFFIAIPGQVTEQQQLQTRANVTRLCQVTSTDHGRTWSSPRDLTDAAIGPAYREWSTFAVGPGHCLQLHDRARSLVVPAYAYRKLHPKQRPIPSAFCFLSHDHGRTWARGHFVAQDTLECQVAEVETGEQRVVTLNARSHLRARVQAQSTNDGLDFQESQLVKKLVEPPPAGCQGSVISFPSPRSGPGSPAQWLLYTHPTHRKQRADLGAYLNPRPPAPEAWSEPVLLAKGSAAYSDLQSMGTGPDGSPLFGCLYEANDYEEIVFLMFTLKQAFPAEYLPQGGGGSGGGGSDKTHTCPPCPAPELLGGPSVFLFPPKPKDTLMISRTPEVTCVVVDVSHEDPEVKFNWYVDGVEVHNAKTKPREEQYNSTYRVVSVLTVLHQDWLNGKEYKCKVSNKALPAPIEKTISKAKGQPREPQVYTLPPSREEMTKNQVSLTCLVKGFYPSDIAVEWESNGQPENNYKTTPPVLDSDGSFFLYSKLTVDKSRWQQGNVFSCSVMHEALHNHYTQKSLSLSPGK

SEQ ID NO: 125 - protein, 617 aa, Artificial Sequence
  Description of Artificial Sequence: Synthetic polypeptide
DASLPYLQKESVFQSGAHAYRIPALLYLPGQQSLLAFAEQRASKKDEHAELIVLRRGDYDASTHQVQWQAQEVVAQARLDGHRSMNPCPLYDAQTGTLFLFFIAIPGQVTEQQQLQTRANVTRLCQVTSTDHGRTWSSPRDLTDAAIGPAYREWSTFAVGPGHCLQLHDRARSLVVPAYAYRKLHPKQRPIPSAFCFLSHDHGRTWARGHFVAQDTLECQVAEVETGEQRVVTLNARSHLRARVQAQSTNDGLDFQESQLVKKLVEPPPAGCQGSVISFPSPRSGPGSPAQWLLYTHPTHRKQRADLGAYLNPRPPAPEAWSEPVLLAKGSAAYSDLQSMGTGPDGSPLFGCLYEANDYEEIVFLMFTLKQAFPAEYLPQGGGGSGGGGSDKTHTCPPCPAPELLGGPSVFLFPPKPKDTLMISRTPEVTCVVVDVSHEDPEVKFNWYVDGVEVHNAKTKPREEQYNSTYRVVSVLTVLHQDWLNGKEYKCKVSNKALPAPIEKTISKAKGQPREPQVYTLPPSREEMTKNQVSLTCLVKGFYPSDIAVEWESNGQPENNYKTTPPVLDSDGSFFLYSKLTVDKSRWQQGNVFSCSVMHEALHNHYTQKSLSLSPGK

SEQ ID NO: 126 - protein, 617 aa, Artificial Sequence
  Description of Artificial Sequence: Synthetic polypeptide
DASLPYLQKESVFQSGAHAYRIPALLYLPGQQSLLAFAEQRASKKDEHAELIVLRRGDYDATTHQVQWQAQEVVAQARLDGHRSMNPCPLYDAQTGTLFLFFIAIPGQVTEQQQLQTRANVTRLCQVTSTDHGRTWSSPRDLTDAAIGPAYREWSTFAVGPGHCLQLHDRARSLVVPAYAYRKLHPKQRPIPSAFCFLSHDHGRTWARGHFVAQDTLECQVAEVETGEQRVVTLNARSHLRARVQAQSTNDGLDFQESQLVKKLVEPPPAGCQGSVISFPSPRSGPGSPAQWLLYTHPTHRKQRADLGAYLNPRPPAPEAWSEPVLLAKGSAAYSDLQSMGTGPDGSPLFGCLYEANDYEEIVFLMFTLKQAFPAEYLPQGGGGSGGGGSDKTHTCPPCPAPELLGGPSVFLFPPKPKDTLMISRTPEVTCVVVDVSHEDPEVKFNWYVDGVEVHNAKTKPREEQYNSTYRVVSVLTVLHQDWLNGKEYKCKVSNKALPAPIEKTISKAKGQPREPQVYTLPPSREEMTKNQVSLTCLVKGFYPSDIAVEWESNGQPENNYKTTPPVLDSDGSFFLYSKLTVDKSRWQQGNVFSCSVMHEALHNHYTQKSLSLSPGK

SEQ ID NO: 127 - protein, 617 aa, Artificial Sequence
  Description of Artificial Sequence: Synthetic polypeptide
DASLPYLQKESVFQSGAHAYRIPALLYLPGQQSLLAFAEQRASKKDEHAELIVLRRGDYDANTHQVQWQAQEVVAQARLDGHRSMNPCPLYDAQTGTLFLFFIAIPGQVTEQQQLQTRANVTRLCQVTSTDHGRTWSSPRDLTDAAIGPAYREWSTFAVGPGHCLQLHDRARSLVVPAYAYRKLHPKQRPIPSAFCFLSHDHGRTWARGHFVAQDTLECQVAEVETGEQRVVTLNARSHLRARVQAQSTNDGLDFQESQLVKKLVEPPPAGCQGSVISFPSPRSGPGSPAQWLLYTHPTHRKQRADLGAYLNPRPPAPEAWSEPVLLAKGSAAYSDLQSMGTGPDGSPLFGCLYEANDYEEIVFLMFTLKQAFPAEYLPQGGGGSGGGGSDKTHTCPPCPAPELLGGPSVFLFPPKPKDTLMISRTPEVTCVVVDVSHEDPEVKFNWYVDGVEVHNAKTKPREEQYNSTYRVVSVLTVLHQDWLNGKEYKCKVSNKALPAPIEKTISKAKGQPREPQVYTLPPSREEMTKNQVSLTCLVKGFYPSDIAVEWESNGQPENNYKTTPPVLDSDGSFFLYSKLTVDKSRWQQGNVFSCSVMHEALHNHYTQKSLSLSPGK

SEQ ID NO: 128 - protein, 611 aa, Artificial Sequence
  Description of Artificial Sequence: Synthetic polypeptide
ASLPYLQKESVFQSGAHAYRIPALLYLPGQQSLLAFAEQRASKKDEHAELIVLRRGDYDAPTHQVQWQAQEVVAQARLDGHRSMNPCPLYDAQTGTLFLFFIAIPGQVTEQQQLQTRANVTRLCQVTSTDHGRTWSSPRDLTDAAIGPAYREWSTFAVGPGHCLQLHDRARSLVVPAYAYRKLHPKQRPIPSAFCFLSHDHGRTWARGHFVAQDTLECQVAEVETGEQRVVTLNARSHLRARVQAQSTNDGLDFQESQLVKKLVEPPPQGCQGSVISFPSPRSGPGSPAQWLLYTHPTHSWQRADLGAYLNPRPPAPEAWSEPVLLAKGSCAYSDLQSMGTGPDGSPLFGCLYEANDYEEIVFLMFTLKQAFPAEYLPQEPKSSDKTHTCPPCPAPELLGGPSVFLFPPKPKDTLMISRTPEVTCVVVDVSHEDPEVKFNWYVDGVEVHNAKTKPREEQYNSTYRVVSVLTVLHQDWLNGKEYKCKVSNKALPAPIEKTISKAKGQPREPQVYTLPPSREEMTKNQVSLTCLVKGFYPSDIAVEWESNGQPENNYKTTPPVLDSDGSFFLYSKLTVDKSRWQQGNVFSCSVMHEALHNHYTQKSLSLSPGK

SEQ ID NO: 129 - protein, 611 aa, Artificial Sequence
  Description of Artificial Sequence: Synthetic polypeptide
ASLPYLQKESVFQSGAHAYRIPALLYLPGQQSLLAFAEQRASKKDEHAELIVLRRGDYDAPTHQVQWQAQEVVAQARLDGHRSMNPCPLYDAQTGTLFLFFIAIPGQVTEQQQLQTRANVTRLCQVTSTDHGRTWSSPRDLTDAAIGPAYREWSTFAVGPGHCLQLHDRARSLVVPAYAYRKLHPKQRPIPSAFCFLSHDHGRTWARGHFVAQDTLECQVAEVETGEQRVVTLNARSHLRARVQAQSTNDGLDFQESQLVKKLVEPPPQGCQGSVISFPSPRSGPGSPAQWLLYTHPTHSWQRADLGAYLNPRPPAPEAWSEPVLLAKGSAAYSDLQSMGTGPDGSPLFGCLYEANDYEEIVFLMFTLKQAFPAEYLPQEPKSSDKTHTCPPCPAPELLGGPSVFLFPPKPKDTLMISRTPEVTCVVVDVSHEDPEVKFNWYVDGVEVHNAKTKPREEQYNSTYRVVSVLTVLHQDWLNGKEYKCKVSNKALPAPIEKTISKAKGQPREPQVYTLPPSREEMTKNQVSLTCLVKGFYPSDIAVEWESNGQPENNYKTTPPVLDSDGSFFLYSKLTVDKSRWQQGNVFSCSVMHEALHNHYTQKSLSLSPGK

SEQ ID NO: 130 - protein, 612 aa, Artificial Sequence
  Description of Artificial Sequence: Synthetic polypeptide
AASLPYLQKESVFQSGAHAYRIPALLYLPGQQSLLAFAEQRASKKDEHAELIVLRRGDYDAPTHQVQWQAQEVVAQARLDGHRSMNPCPLYDAQTGTLFLFFIAIPGQVTEQQQLQTRANVTRLCQVTSTDHGRTWSSPRDLTDAAIGPAYREWSTFAVGPGHCLQLHDRARSLVVPAYAYRKLHPKQRPIPSAFCFLSHDHGRTWARGHFVAQDTLECQVAEVETGEQRVVTLNARSHLRARVQAQSTNDGLDFQESQLVKKLVEPPPQGCQGSVISFPSPRSGPGSPAQWLLYTHPTHSWQRADLGAYLNPRPPAPEAWSEPVLLAKGSAAYSDLQSMGTGPDGSPLFGCLYEANDYEEIVFLMFTLKQAFPAEYLPQEPKSSDKTHTCPPCPAPELLGGPSVFLFPPKPKDTLMISRTPEVTCVVVDVSHEDPEVKFNWYVDGVEVHNAKTKPREEQYNSTYRVVSVLTVLHQDWLNGKEYKCKVSNKALPAPIEKTISKAKGQPREPQVYTLPPSREEMTKNQVSLTCLVKGFYPSDIAVEWESNGQPENNYKTTPPVLDSDGSFFLYSKLTVDKSRWQQGNVFSCSVMHEALHNHYTQKSLSLSPGK

SEQ ID NO: 131 - protein, 612 aa, Artificial Sequence
  Description of Artificial Sequence: Synthetic polypeptide
DASLPYLQKESVFQSGAHAYRIPALLYLPGQQSLLAFAEQRASKKDEHAELIVLRRGDYDAPTHQVQWQAQEVVAQARLDGHRSMNPCPLYDAQTGTLFLFFIAIPGQVTEQQQLQTRANVTRLCQVTSTDHGRTWSSPRDLTDAAIGPAYREWSTFAVGPGHCLQLHDRARSLVVPAYAYRKLHPKQRPIPSAFCFLSHDHGRTWARGHFVAQDTLECQVAEVETGEQRVVTLNARSHLRARVQAQSTNDGLDFQESQLVKKLVEPPPQGCQGSVISFPSPRSGPGSPAQWLLYTHPTHSWQRADLGAYLNPRPPAPEAWSEPVLLAKGSAAYSDLQSMGTGPDGSPLFGCLYEANDYEEIVFLMFTLKQAFPAEYLPQEPKSSDKTHTCPPCPAPELLGGPSVFLFPPKPKDTLMISRTPEVTCVVVDVSHEDPEVKFNWYVDGVEVHNAKTKPREEQYNSTYRVVSVLTVLHQDWLNGKEYKCKVSNKALPAPIEKTISKAKGQPREPQVYTLPPSREEMTKNQVSLTCLVKGFYPSDIAVEWESNGQPENNYKTTPPVLDSDGSFFLYSKLTVDKSRWQQGNVFSCSVMHEALHNHYTQKSLSLSPGK

SEQ ID NO: 132 - protein, 612 aa, Artificial Sequence
  Description of Artificial Sequence: Synthetic polypeptide
AASLPYLQKESVFQSGAHAYRIPALLYLPGQQSLLAFAEQRASKKDEHAELIVLRRGDYDAPTHQVQWQAQEVVAQARLDGHRSMNPCPLYDAQTGTLFLFFIAIPGQVTEQQQLQTRANVTRLCQVTSTDHGRTWSSPRDLTDAAIGPAYREWSTFAVGPGHCLQLHDRARSLVVPAYAYRKLHPKQRPIPSAFCFLSHDHGRTWARGHFVAQDTLECQVAEVETGEQRVVTLNARSHLRARVQAQSTNDGLDFQESQLVKKLVEPPPQGCQGSVISFPSPRSGPGSPAQWLLYTHPTHSWQRADLGAYLNPRPPAPEAWSEPVLLAKGSCAYSDLQSMGTGPDGSPLFGCLYEANDYEEIVFLMFTLKQAFPAEYLPQEPKSSDKTHTCPPCPAPELLGGPSVFLFPPKPKDTLMISRTPEVTCVVVDVSHEDPEVKFNWYVDGVEVHNAKTKPREEQYNSTYRVVSVLTVLHQDWLNGKEYKCKVSNKALPAPIEKTISKAKGQPREPQVYTLPPSREEMTKNQVSLTCLVKGFYPSDIAVEWESNGQPENNYKTTPPVLDSDGSFFLYSKLTVDKSRWQQGNVFSCSVMHEALHNHYTQKSLSLSPGK

SEQ ID NO: 133 - protein, 612 aa, Artificial Sequence
  Description of Artificial Sequence: Synthetic polypeptide
DASLPYLQKESVFQSGAHAYRIPALLYLPGQQSLLAFAEQRASKKDEHAELIVLRRGDYDAPTHQVQWQAQEVVAQARLDGHRSMNPCPLYDAQTGTLFLFFIAIPGQVTEQQQLQTRANVTRLCQVTSTDHGRTWSSPRDLTDAAIGPAYREWSTFAVGPGHCLQLHDRARSLVVPAYAYRKLHPKQRPIPSAFCFLSHDHGRTWARGHFVAQDTLECQVAEVETGEQRVVTLNARSHLRARVQAQSTNDGLDFQESQLVKKLVEPPPQGCQGSVISFPSPRSGPGSPAQWLLYTHPTHSWQRADLGAYLNPRPPAPEAWSEPVLLAKGSCAYSDLQSMGTGPDGSPLFGCLYEANDYEEIVFLMFTLKQAFPAEYLPQEPKSSDKTHTCPPCPAPELLGGPSVFLFPPKPKDTLMISRTPEVTCVVVDVSHEDPEVKFNWYVDGVEVHNAKTKPREEQYNSTYRVVSVLTVLHQDWLNGKEYKCKVSNKALPAPIEKTISKAKGQPREPQVYTLPPSREEMTKNQVSLTCLVKGFYPSDIAVEWESNGQPENNYKTTPPVLDSDGSFFLYSKLTVDKSRWQQGNVFSCSVMHEALHNHYTQKSLSLSPGK

SEQ ID NO: 134 - protein, 612 aa, Artificial Sequence
  Description of Artificial Sequence: Synthetic polypeptide
MASLPYLQKESVFQSGAHAYRIPALLYLPGQQSLLAFAEQRASKKDEHAELIVLRRGDYDAPTHQVQWQAQEVVAQARLDGHRSMNPCPLYDAQTGTLFLFFIAIPGQVTEQQQLQTRANVTRLCQVTSTDHGRTWSSPRDLTDAAIGPAYREWSTFAVGPGHCLQLHDRARSLVVPAYAYRKLHPKQRPIPSAFCFLSHDHGRTWARGHFVAQDTLECQVAEVETGEQRVVTLNARSHLRARVQAQSTNDGLDFQESQLVKKLVEPPPQGCQGSVISFPSPRSGPGSPAQWLLYTHPTHSWQRADLGAYLNPRPPAPEAWSEPVLLAKGSCAYSDLQSMGTGPDGSPLFGCLYEANDYEEIVFLMFTLKQAFPAEYLPQEPKSSDKTHTCPPCPAPELLGGPSVFLFPPKPKDTLMISRTPEVTCVVVDVSHEDPEVKFNWYVDGVEVHNAKTKPREEQYNSTYRVVSVLTVLHQDWLNGKEYKCKVSNKALPAPIEKTISKAKGQPREPQVYTLPPSREEMTKNQVSLTCLVKGFYPSDIAVEWESNGQPENNYKTTPPVLDSDGSFFLYSKLTVDKSRWQQGNVFSCSVMHEALHNHYTQKSLSLSPGK

SEQ ID NO: 135 - protein, 612 aa, Artificial Sequence
  Description of Artificial Sequence: Synthetic polypeptide
MASLPYLQKESVFQSGAHAYRIPALLYLPGQQSLLAFAEQRASKKDEHAELIVLRRGDYDAPTHQVQWQAQEVVAQARLDGHRSMNPCPLYDAQTGTLFLFFIAIPGQVTEQQQLQTRANVTRLCQVTSTDHGRTWSSPRDLTDAAIGPAYREWSTFAVGPGHCLQLHDRARSLVVPAYAYRKLHPKQRPIPSAFCFLSHDHGRTWARGHFVAQDTLECQVAEVETGEQRVVTLNARSHLRARVQAQSTNDGLDFQESQLVKKLVEPPPQGCQGSVISFPSPRSGPGSPAQWLLYTHPTHSWQRADLGAYLNPRPPAPEAWSEPVLLAKGSAAYSDLQSMGTGPDGSPLFGCLYEANDYEEIVFLMFTLKQAFPAEYLPQEPKSSDKTHTCPPCPAPELLGGPSVFLFPPKPKDTLMISRTPEVTCVVVDVSHEDPEVKFNWYVDGVEVHNAKTKPREEQYNSTYRVVSVLTVLHQDWLNGKEYKCKVSNKALPAPIEKTISKAKGQPREPQVYTLPPSREEMTKNQVSLTCLVKGFYPSDIAVEWESNGQPENNYKTTPPVLDSDGSFFLYSKLTVDKSRWQQGNVFSCSVMHEALHNHYTQKSLSLSPGK

SEQ ID NO: 136 - protein, 612 aa, Artificial Sequence
  Description of Artificial Sequence: Synthetic polypeptide
DASLPYLQKESVFQSGAHAYRIPALLYLPGQQSLLAFAEQRASKKDEHAELIVLRRGDYDAGTHQVQWQAQEVVAQARLDGHRSMNPCPLYDEQTGTLFLFFIAIPGQVTEQQQLQTRANVTRLCQVTSTDHGRTWSSPRDLTDAAIGPAYREWSTFAVGPGHCLQLHDRARSLVVPAYAYRKLHPKQRPIPSAFCFLSHDHGRTWARGHFVAQDTLECQVAEVETGEQRVVTLNARSHLRARVQAQSTNDGLDFQESQLVKKLVEPPPQGCQGSVISFPSPRSGPGSPAQWLLYTHPTHSWQRADLGAYLNPRPPAPEAWSEPVLLAKGSAAYSDLQSMGTGPDGSPLFGCLYEANDYEEIVFLMFTLKQAFPAEYLPQEPKSSDKTHTCPPCPAPELLGGPSVFLFPPKPKDTLMISRTPEVTCVVVDVSHEDPEVKFNWYVDGVEVHNAKTKPREEQYNSTYRVVSVLTVLHQDWLNGKEYKCKVSNKALPAPIEKTISKAKGQPREPQVYTLPPSREEMTKNQVSLTCLVKGFYPSDIAVEWESNGQPENNYKTTPPVLDSDGSFFLYSKLTVDKSRWQQGNVFSCSVMHEALHNHYTQKSLSLSPGK

SEQ ID NO: 137 - protein, 612 aa, Artificial Sequence
  Description of Artificial Sequence: Synthetic polypeptide
DASLPYLQDESVFQSGAHAYRIPALLYLPGQQSLLAFAEQRASKKDEHAELIVLRRGDYDAPTHQVQWQAQEVVAQARLDGHRSMNPCPLYDEQTGTLFLFFIAIPGQVTEQQQLQTRANVTRLCQVTSTDHGRTWSSPRDLTDAAIGPAYREWSTFAVGPGHCLQLHDRARSLVVPAYAYRKLHPKQRPIPSAFCFLSHDHGRTWARGHFVAQDTLECQVAEVETGEQRVVTLNARSHLRARVQAQSTNDGLDFQESQLVKKLVEPPPQGCQGSVISFPSPRSGPGSPAQWLLYTHPTHSWQRADLGAYLNPRPPAPEAWSEPVLLAKGSAAYSDLQSMGTGPDGSPLFGCLYEANDYEEIRFIMFTLKQAFPAEYLPQEPKSSDKTHTCPPCPAPELLGGPSVFLFPPKPKDTLMISRTPEVTCVVVDVSHEDPEVKFNWYVDGVEVHNAKTKPREEQYNSTYRVVSVLTVLHQDWLNGKEYKCKVSNKALPAPIEKTISKAKGQPREPQVYTLPPSREEMTKNQVSLTCLVKGFYPSDIAVEWESNGQPENNYKTTPPVLDSDGSFFLYSKLTVDKSRWQQGNVFSCSVMHEALHNHYTQKSLSLSPGK

SEQ ID NO: 138 - protein, 612 aa, Artificial Sequence
  Description of Artificial Sequence: Synthetic polypeptide
DASLPYLQKESVFQSGAHAYRIPALLYLPGQQSLLAFAEQRASKKDEHAELIVLRRGDYDANTHQVQWQAQEVVAQARLDGHRSMNPCPLYDAQTGTLFLFFIAIPGQVTEQQQLQTRANVTRLCQVTSTDHGRTWSSPRDLTDAAIGPAYREWSTFAVGPGHCLQLHDRARSLVVPAYAYRKLHPKQRPIPSAFCFLSHDHGRTWARGHFVAQDTLECQVAEVETGEQRVVTLNARSHLRARVQAQSTNDGLDFQESQLVKKLVEPPPQGCQGSVISFPSPRSGPGSPAQWLLYTHPTHSWQRADLGAYLNPRPPAPEAWSEPVLLAKGSAAYSDLQSMGTGPDGSPLFGCLYEANDYEEIVFLMFTLKQAFPAEYLPQEPKSSDKTHTCPPCPAPELLGGPSVFLFPPKPKDTLMISRTPEVTCVVVDVSHEDPEVKFNWYVDGVEVHNAKTKPREEQYNSTYRVVSVLTVLHQDWLNGKEYKCKVSNKALPAPIEKTISKAKGQPREPQVYTLPPSREEMTKNQVSLTCLVKGFYPSDIAVEWESNGQPENNYKTTPPVLDSDGSFFLYSKLTVDKSRWQQGNVFSCSVMHEALHNHYTQKSLSLSPGK

SEQ ID NO: 139 - protein, 612 aa, Artificial Sequence
  Description of Artificial Sequence: Synthetic polypeptide
DASLPYLQKESVFQSGAHAYRIPALLYLPGQQSLLAFAEQRASKKDEHAELIVLRRGDYDAPTHQVQWQAQEVVAQARLDGHRSMNPCPLYDAQTGTLFLFFIAIPGQVTEQQQLQTRANVTRLCQVTSTDHGRTWSSPRDLTDAAIGPAYREWSTFAVGPGHCLQLHDRARSLVVPAYAYRKLHPKQRPIPSAFCFLSHDHGRTWARGHFVAQDTLECQVAEVETGEQRVVTLNARSHLRARVQAQSTNDGLDFQESQLVKKLVEPPPAGCQGSVISFPSPRSGPGSPAQWLLYTHPTHRKQRADLGAYLNPRPPAPEAWSEPVLLAKGSAAYSDLQSMGTGPDGSPLFGCLYEANDYEEIVFLMFTLKQAFPAEYLPQEPKSSDKTHTCPPCPAPELLGGPSVFLFPPKPKDTLMISRTPEVTCVVVDVSHEDPEVKFNWYVDGVEVHNAKTKPREEQYNSTYRVVSVLTVLHQDWLNGKEYKCKVSNKALPAPIEKTISKAKGQPREPQVYTLPPSREEMTKNQVSLTCLVKGFYPSDIAVEWESNGQPENNYKTTPPVLDSDGSFFLYSKLTVDKSRWQQGNVFSCSVMHEALHNHYTQKSLSLSPGK

SEQ ID NO: 140 - protein, 612 aa, Artificial Sequence
  Description of Artificial Sequence: Synthetic polypeptide
DASLPYLQKESVFQSGAHAYRIPALLYLPGQQSLLAFAEQRASKKDEHAELIVLRRGDYDASTHQVQWQAQEVVAQARLDGHRSMNPCPLYDAQTGTLFLFFIAIPGQVTEQQQLQTRANVTRLCQVTSTDHGRTWSSPRDLTDAAIGPAYREWSTFAVGPGHCLQLHDRARSLVVPAYAYRKLHPKQRPIPSAFCFLSHDHGRTWARGHFVAQDTLECQVAEVETGEQRVVTLNARSHLRARVQAQSTNDGLDFQESQLVKKLVEPPPAGCQGSVISFPSPRSGPGSPAQWLLYTHPTHRKQRADLGAYLNPRPPAPEAWSEPVLLAKGSAAYSDLQSMGTGPDGSPLFGCLYEANDYEEIVFLMFTLKQAFPAEYLPQEPKSSDKTHTCPPCPAPELLGGPSVFLFPPKPKDTLMISRTPEVTCVVVDVSHEDPEVKFNWYVDGVEVHNAKTKPREEQYNSTYRVVSVLTVLHQDWLNGKEYKCKVSNKALPAPIEKTISKAKGQPREPQVYTLPPSREEMTKNQVSLTCLVKGFYPSDIAVEWESNGQPENNYKTTPPVLDSDGSFFLYSKLTVDKSRWQQGNVFSCSVMHEALHNHYTQKSLSLSPGK

SEQ ID NO: 141 - protein, 612 aa, Artificial Sequence
  Description of Artificial Sequence: Synthetic polypeptide
DASLPYLQKESVFQSGAHAYRIPALLYLPGQQSLLAFAEQRASKKDEHAELIVLRRGDYDATTHQVQWQAQEVVAQARLDGHRSMNPCPLYDAQTGTLFLFFIAIPGQVTEQQQLQTRANVTRLCQVTSTDHGRTWSSPRDLTDAAIGPAYREWSTFAVGPGHCLQLHDRARSLVVPAYAYRKLHPKQRPIPSAFCFLSHDHGRTWARGHFVAQDTLECQVAEVETGEQRVVTLNARSHLRARVQAQSTNDGLDFQESQLVKKLVEPPPAGCQGSVISFPSPRSGPGSPAQWLLYTHPTHRKQRADLGAYLNPRPPAPEAWSEPVLLAKGSAAYSDLQSMGTGPDGSPLFGCLYEANDYEEIVFLMFTLKQAFPAEYLPQEPKSSDKTHTCPPCPAPELLGGPSVFLFPPKPKDTLMISRTPEVTCVVVDVSHEDPEVKFNWYVDGVEVHNAKTKPREEQYNSTYRVVSVLTVLHQDWLNGKEYKCKVSNKALPAPIEKTISKAKGQPREPQVYTLPPSREEMTKNQVSLTCLVKGFYPSDIAVEWESNGQPENNYKTTPPVLDSDGSFFLYSKLTVDKSRWQQGNVFSCSVMHEALHNHYTQKSLSLSPGK

SEQ ID NO: 142 - protein, 612 aa, Artificial Sequence
  Description of Artificial Sequence: Synthetic polypeptide
DASLPYLQKESVFQSGAHAYRIPALLYLPGQQSLLAFAEQRASKKDEHAELIVLRRGDYDANTHQVQWQAQEVVAQARLDGHRSMNPCPLYDAQTGTLFLFFIAIPGQVTEQQQLQTRANVTRLCQVTSTDHGRTWSSPRDLTDAAIGPAYREWSTFAVGPGHCLQLHDRARSLVVPAYAYRKLHPKQRPIPSAFCFLSHDHGRTWARGHFVAQDTLECQVAEVETGEQRVVTLNARSHLRARVQAQSTNDGLDFQESQLVKKLVEPPPAGCQGSVISFPSPRSGPGSPAQWLLYTHPTHRKQRADLGAYLNPRPPAPEAWSEPVLLAKGSAAYSDLQSMGTGPDGSPLFGCLYEANDYEEIVFLMFTLKQAFPAEYLPQEPKSSDKTHTCPPCPAPELLGGPSVFLFPPKPKDTLMISRTPEVTCVVVDVSHEDPEVKFNWYVDGVEVHNAKTKPREEQYNSTYRVVSVLTVLHQDWLNGKEYKCKVSNKALPAPIEKTISKAKGQPREPQVYTLPPSREEMTKNQVSLTCLVKGFYPSDIAVEWESNGQPENNYKTTPPVLDSDGSFFLYSKLTVDKSRWQQGNVFSCSVMHEALHNHYTQKSLSLSPGK

SEQ ID NO: 143 - protein, 608 aa, Artificial Sequence
  Description of Artificial Sequence: Synthetic polypeptide
  MOD_RES (1)..(2): Any amino acid
  MOD_RES (4)..(6): Any amino acid
  MOD_RES (9)..(9): Any amino acid
  MOD_RES (44)..(45): Any amino acid
  MOD_RES (54)..(54): Any amino acid
  MOD_RES (62)..(62): Any amino acid
  MOD_RES (69)..(69): Any amino acid
  MOD_RES (78)..(78): Any amino acid
  MOD_RES (93)..(93): Any amino acid
  MOD_RES (107)..(108): Any amino acid
  MOD_RES (112)..(112): Any amino acid
  MOD_RES (125)..(126): Any amino acid
  MOD_RES (150)..(150): Any amino acid
  MOD_RES (164)..(164): Any amino acid
  MOD_RES (171)..(171): Any amino acid
  MOD_RES (187)..(187): Any amino acid
  MOD_RES (196)..(196): Any amino acid
  MOD_RES (217)..(217): Any amino acid
  MOD_RES (249)..(249): Any amino acid
  MOD_RES (251)..(251): Any amino acid
  MOD_RES (257)..(257): Any amino acid
  MOD_RES (270)..(270): Any amino acid
  MOD_RES (272)..(272): Any amino acid
  MOD_RES (292)..(292): Any amino acid
  MOD_RES (301)..(302): Any amino acid
  MOD_RES (325)..(325): Any amino acid
  MOD_RES (332)..(332): Any amino acid
  MOD_RES (352)..(352): Any amino acid
  MOD_RES (363)..(363): Any amino acid
  MOD_RES (365)..(365): Any amino acid
  MOD_RES (381)..(381): Any amino acid
XXSXXXLQXESVFQSGAHAYRIPALLYLPGQQSLLAFAEQRASXXDEHAELIVXRRGDYDAXTHQVQWXAQEVVAQAXLDGHRSMNPCPLYDXQTGTLFLFFIAIPXXVTEXQQLQTRANVTRLXXVTSTDHGRTWSSPRDLTDAAIGPXYREWSTFAVGPGHXLQLHDRXRSLVVPAYAYRKLHPXQRPIPSAFXFLSHDHGRTWARGHFVAQDTXECQVAEVETGEQRVVTLNARSHLRARVQAQSXNXGLDFQXSQLVKKLVEPPPXGXQGSVISFPSPRSGPGSPAQXLLYTHPTHXXQRADLGAYLNPRPPAPEAWSEPXLLAKGSXAYSDLQSMGTGPDGSPLFGXLYEANDYEEIXFXMFTLKQAFPAEYLPQXDKTHTCPPCPAPELLGGPSVFLFPPKPKDTLMISRTPEVTCVVVDVSHEDPEVKFNWYVDGVEVHNAKTKPREEQYNSTYRVVSVLTVLHQDWLNGKEYKCKVSNKALPAPIEKTISKAKGQPREPQVYTLPPSREEMTKNQVSLTCLVKGFYPSDIAVEWESNGQPENNYKTTPPVLDSDGSFFLTSKLTVDKSRWQQGNVFSCSVMHEALHNHYTQKSLSLSPGK

SEQ ID NO: 144 - protein, 608 aa, Artificial Sequence
  Description of Artificial Sequence: Synthetic polypeptide
  MOD_RES (1)..(1): Any amino acid
  MOD_RES (6)..(6): Any amino acid
  MOD_RES (9)..(9): Any amino acid
  MOD_RES (62)..(62): Any amino acid
  MOD_RES (93)..(93): Any amino acid
  MOD_RES (187)..(187): Any amino acid
  MOD_RES (270)..(270): Any amino acid
  MOD_RES (301)..(302): Any amino acid
  MOD_RES (332)..(332): Any amino acid
  MOD_RES (363)..(363): Any amino acid
  MOD_RES (365)..(365): Any amino acid
  MOD_RES (381)..(381): Any amino acid
XASLPXLQXESVFQSGAHAYRIPALLYLPGQQSLLAFAEQRASKKDEHAELIVLRRGDYDAXTHQVQWQAQEVVAQARLDGHRSMNPCPLYDXQTGTLFLFFIAIPGQVTEQQQLQTRANVTRLCQVTSTDHGRTWSSPRDLTDAAIGPAYREWSTFAVGPGHCLQLHDRARSLVVPAYAYRKLHPXQRPIPSAFCFLSHDHGRTWARGHFVAQDTLECQVAEVETGEQRVVTLNARSHLRARVQAQSTNDGLDFQESQLVKKLVEPPPXGCQGSVISFPSPRSGPGSPAQWLLYTHPTHXXQRADLGAYLNPRPPAPEAWSEPVLLAKGSXAYSDLQSMGTGPDGSPLFGCLYEANDYEEIXFXMFTLKQAFPAEYLPQXDKTHTCPPCPAPELLGGPSVFLFPPKPKDTLMISRTPEVTCVVVDVSHEDPEVKFNWYVDGVEVHNAKTKPREEQYNSTYRVVSVLTVLHQDWLNGKEYKCKVSNKALPAPIEKTISKAKGQPREPQVYTLPPSREEMTKNQVSLTCLVKGFYPSDIAVEWESNGQPENNYKTTPPVLDSDGSFFLTSKLTVDKSRWQQGNVFSCSVMHEALHNHYTQKSLSLSPGK

SEQ ID NO: 145 - protein, 10 aa, Artificial Sequence
  Description of Artificial Sequence: Synthetic peptide
GGGGSGGGGS

SEQ ID NO: 146 - protein, 5 aa, Artificial Sequence
  Description of Artificial Sequence: Synthetic peptide
EPKSS

SEQ ID NO: 147 - protein, 232 aa, Artificial Sequence
  Description of Artificial Sequence: Synthetic polypeptide
EPKSCDKTHTCPPCPAPELLGGPSVFLFPPKPKDTLMISRTPEVTCVVVDVSHEDPEVKFNWYVDGVEVHNAKTKPREEQYNSTYRVVSVLTVLHQDWLNGKEYKCKVSNKALPAPIEKTISKAKGQPREPQVYTLPPSREEMTKNQVSLTCLVKGFYPSDIAVEWESNGQPENNYKTTPPVLDSDGSFFLTSKLTVDKSRWQQGNVFSCSVMHEALHNHYTQKSLSLSPGK

SEQ ID NO: 148 - protein, 227 aa, Artificial Sequence
  Description of Artificial Sequence: Synthetic polypeptide
DKTHTCPPCPAPELLGGPSVFLFPPKPKDTLMISRTPEVTCVVVDVSHEDPEVKFNWYVDGVEVHNAKTKPREEQYNSTYRVVSVLTVLHQDWLNGKEYKCKVSNKALPAPIEKTISKAKGQPREPQVYTLPPSREEMTKNQVSLYCLVKGFYPSDIAVEWESNGQPENNYKTTPPVLDSDGSFFLYSKLTVDKSRWQQGNVFSCSVMHEALHNHYTQKSLSLSPGK

SEQ ID NO: 149 - protein, 380 aa, Artificial Sequence
  Description of Artificial Sequence: Synthetic polypeptide
DASLPYLQKESVFQSGAHAYRIPALLYLPGQQSLLAFAEQRASKKDEHAELIVLRRGDYDAGTHQVQWQAQEVVAQARLDGHRSMNPCPLYDEQTGTLFLFFIAIPGQVTEQQQLQTRANVTRLCQVTSTDHGRTWSSPRDLTDAAIGPAYREWSTFAVGPGHCLQLHDRARSLVVPAYAYRKLHPKQRPIPSAFCFLSHDHGRTWARGHFVAQDTLECQVAEVETGEQRVVTLNARSHLRARVQAQSTNDGLDFQESQLVKKLVEPPPQGCQGSVISFPSPRSGPGSPAQWLLYTHPTHARQRADLGAYLNPRPPAPEAWSEPVLLAKGSAAYSDLQSMGTGPDGSPLFGCLYEANDYEEIVFLMFTLKQAFPAEYLPQ

SEQ ID NO: 150 - protein, 617 aa, Artificial Sequence
  Description of Artificial Sequence: Synthetic polypeptide
DASLPYLQKESVFQSGAHAYRIPALLYLPGQQSLLAFAEQRASKKDEHAELIVLRRGDYDAGTHQVQWQAQEVVAQARLDGHRSMNPCPLYDEQTGTLFLFFIAIPGQVTEQQQLQTRANVTRLCQVTSTDHGRTWSSPRDLTDAAIGPAYREWSTFAVGPGHCLQLHDRARSLVVPAYAYRKLHPKQRPIPSAFCFLSHDHGRTWARGHFVAQDTLECQVAEVETGEQRVVTLNARSHLRARVQAQSTNDGLDFQESQLVKKLVEPPPQGCQGSVISFPSPRSGPGSPAQWLLYTHPTHARQRADLGAYLNPRPPAPEAWSEPVLLAKGSAAYSDLQSMGTGPDGSPLFGCLYEANDYEEIVFLMFTLKQAFPAEYLPQGGGGSGGGGSDKTHTCPPCPAPELLGGPSVFLFPPKPKDTLMISRTPEVTCVVVDVSHEDPEVKFNWYVDGVEVHNAKTKPREEQYNSTYRVVSVLTVLHQDWLNGKEYKCKVSNKALPAPIEKTISKAKGQPREPQVYTLPPSREEMTKNQVSLTCLVKGFYPSDIAVEWESNGQPENNYKTTPPVLDSDGSFFLTSKLTVDKSRWQQGNVFSCSVMHEALHNHYTQKSLSLSPGK

SEQ ID NO: 151 - protein, 612 aa, Artificial Sequence
  Description of Artificial Sequence: Synthetic polypeptide
DASLPYLQKESVFQSGAHAYRIPALLYLPGQQSLLAFAEQRASKKDEHAELIVLRRGDYDAGTHQVQWQAQEVVAQARLDGHRSMNPCPLYDEQTGTLFLFFIAIPGQVTEQQQLQTRANVTRLCQVTSTDHGRTWSSPRDLTDAAIGPAYREWSTFAVGPGHCLQLHDRARSLVVPAYAYRKLHPKQRPIPSAFCFLSHDHGRTWARGHFVAQDTLECQVAEVETGEQRVVTLNARSHLRARVQAQSTNDGLDFQESQLVKKLVEPPPQGCQGSVISFPSPRSGPGSPAQWLLYTHPTHARQRADLGAYLNPRPPAPEAWSEPVLLAKGSAAYSDLQSMGTGPDGSPLFGCLYEANDYEEIVFLMFTLKQAFPAEYLPQEPKSSDKTHTCPPCPAPELLGGPSVFLFPPKPKDTLMISRTPEVTCVVVDVSHEDPEVKFNWYVDGVEVHNAKTKPREEQYNSTYRVVSVLTVLHQDWLNGKEYKCKVSNKALPAPIEKTISKAKGQPREPQVYTLPPSREEMTKNQVSLTCLVKGFYPSDIAVEWESNGQPENNYKTTPPVLDSDGSFFLTSKLTVDKSRWQQGNVFSCSVMHEALHNHYTQKSLSLSPGK

SEQ ID NO: 152 - protein, 617 aa, Artificial Sequence
  Description of Artificial Sequence: Synthetic polypeptide
DASLPYLQKESVFQSGAHAYRIPALLYLPGQQSLLAFAEQRASKKDEHAELIVLRRGDYDAGTHQVQWQAQEVVAQARLDGHRSMNPCPLYDEQTGTLFLFFIAIPGQVTEQQQLQTRANVTRLCQVTSTDHGRTWSSPRDLTDAAIGPAYREWSTFAVGPGHCLQLHDRARSLVVPAYAYRKLHPKQRPIPSAFCFLSHDHGRTWARGHFVAQDTLECQVAEVETGEQRVVTLNARSHLRARVQAQSTNDGLDFQESQLVKKLVEPPPQGCQGSVISFPSPRSGPGSPAQWLLYTHPTHARQRADLGAYLNPRPPAPEAWSEPVLLAKGSAAYSDLQSMGTGPDGSPLFGCLYEANDYEEIVFLMFTLKQAFPAEYLPQGGGGSGGGGSDKTHTCPPCPAPELLGGPSVFLFPPKPKDTLMISRTPEVTCVVVDVSHEDPEVKFNWYVDGVEVHNAKTKPREEQYNSTYRVVSVLTVLHQDWLNGKEYKCKVSNKALPAPIEKTISKAKGQPREPQVYTLPPSREEMTKNQVSLTCLVKGFYPSDIAVEWESNGQPENNYKTTPPVLDSDGSFFLYSKLTVDKSRWQQGNVFSCSVMHEALHNHYTQKSLSLSPGK

SEQ ID NO: 153 - protein, 612 aa, Artificial Sequence
  Description of Artificial Sequence: Synthetic polypeptide
DASLPYLQKESVFQSGAHAYRIPALLYLPGQQSLLAFAEQRASKKDEHAELIVLRRGDYDAGTHQVQWQAQEVVAQARLDGHRSMNPCPLYDEQTGTLFLFFIAIPGQVTEQQQLQTRANVTRLCQVTSTDHGRTWSSPRDLTDAAIGPAYREWSTFAVGPGHCLQLHDRARSLVVPAYAYRKLHPKQRPIPSAFCFLSHDHGRTWARGHFVAQDTLECQVAEVETGEQRVVTLNARSHLRARVQAQSTNDGLDFQESQLVKKLVEPPPQGCQGSVISFPSPRSGPGSPAQWLLYTHPTHARQRADLGAYLNPRPPAPEAWSEPVLLAKGSAAYSDLQSMGTGPDGSPLFGCLYEANDYEEIVFLMFTLKQAFPAEYLPQEPKSSDKTHTCPPCPAPELLGGPSVFLFPPKPKDTLMISRTPEVTCVVVDVSHEDPEVKFNWYVDGVEVHNAKTKPREEQYNSTYRVVSVLTVLHQDWLNGKEYKCKVSNKALPAPIEKTISKAKGQPREPQVYTLPPSREEMTKNQVSLTCLVKGFYPSDIAVEWESNGQPENNYKTTPPVLDSDGSFFLYSKLTVDKSRWQQGNVFSCSVMHEALHNHYTQKSLSLSPGK

SEQ ID NO: 154 - protein, 380 aa, Artificial Sequence
  Description of Artificial Sequence: Synthetic polypeptide
DASLPYLQKESVFQSGAHAYRIPALLYLPGQQSLLAFAEQRASKKDEHAELIVLRRGDYDAGTHQVQWQAQEVVAQARLDGHRSMNPCPLYDEQTGTLFLFFIAIPGQVTEQQQLQTRANVTRLCYVTSTDHGRTWSSPRDLTDAAIGPAYREWSTFAVGPGHCLQLHDRARSLVVPAYAYRKLHPKQRPIPSAFCFLSHDHGRTWARGHFVAQDTLECQVAEVETGEQRVVTLNARSHLRARVQAQSTNDGLDFQESQLVKKLVEPPPTGCQGSVISFPSPRSGPGSPAQWLLYTHPTHSWQRADLGAYLNPRPPAPEAWSEPVLLAKGSAAYSDLQSMGTGPDGSPLFGCLYEANDYEEIVFLMFTLKQAFPAEYLPQ

SEQ ID NO: 155 - protein, 617 aa, Artificial Sequence
  Description of Artificial Sequence: Synthetic polypeptide
DASLPYLQKESVFQSGAHAYRIPALLYLPGQQSLLAFAEQRASKKDEHAELIVLRRGDYDAGTHQVQWQAQEVVAQARLDGHRSMNPCPLYDEQTGTLFLFFIAIPGQVTEQQQLQTRANVTRLCYVTSTDHGRTWSSPRDLTDAAIGPAYREWSTFAVGPGHCLQLHDRARSLVVPAYAYRKLHPKQRPIPSAFCFLSHDHGRTWARGHFVAQDTLECQVAEVETGEQRVVTLNARSHLRARVQAQSTNDGLDFQESQLVKKLVEPPPTGCQGSVISFPSPRSGPGSPAQWLLYTHPTHSWQRADLGAYLNPRPPAPEAWSEPVLLAKGSAAYSDLQSMGTGPDGSPLFGCLYEANDYEEIVFLMFTLKQAFPAEYLPQGGGGSGGGGSDKTHTCPPCPAPELLGGPSVFLFPPKPKDTLMISRTPEVTCVVVDVSHEDPEVKFNWYVDGVEVHNAKTKPREEQYNSTYRVVSVLTVLHQDWLNGKEYKCKVSNKALPAPIEKTISKAKGQPREPQVYTLPPSREEMTKNQVSLTCLVKGFYPSDIAVEWESNGQPENNYKTTPPVLDSDGSFFLTSKLTVDKSRWQQGNVFSCSVMHEALHNHYTQKSLSLSPGK

SEQ ID NO: 156 - protein, 612 aa, Artificial Sequence
  Description of Artificial Sequence: Synthetic polypeptide
DASLPYLQKESVFQSGAHAYRIPALLYLPGQQSLLAFAEQRASKKDEHAELIVLRRGDYDAGTHQVQWQAQEVVAQARLDGHRSMNPCPLYDEQTGTLFLFFIAIPGQVTEQQQLQTRANVTRLCYVTSTDHGRTWSSPRDLTDAAIGPAYREWSTFAVGPGHCLQLHDRARSLVVPAYAYRKLHPKQRPIPSAFCFLSHDHGRTWARGHFVAQDTLECQVAEVETGEQRVVTLNARSHLRARVQAQSTNDGLDFQESQLVKKLVEPPPTGCQGSVISFPSPRSGPGSPAQWLLYTHPTHSWQRADLGAYLNPRPPAPEAWSEPVLLAKGSAAYSDLQSMGTGPDGSPLFGCLYEANDYEEIVFLMFTLKQAFPAEYLPQEPKSSDKTHTCPPCPAPELLGGPSVFLFPPKPKDTLMISRTPEVTCVVVDVSHEDPEVKFNWYVDGVEVHNAKTKPREEQYNSTYRVVSVLTVLHQDWLNGKEYKCKVSNKALPAPIEKTISKAKGQPREPQVYTLPPSREEMTKNQVSLTCLVKGFYPSDIAVEWESNGQPENNYKTTPPVLDSDGSFFLTSKLTVDKSRWQQGNVFSCSVMHEALHNHYTQKSLSLSPGK

SEQ ID NO: 157 - protein, 617 aa, Artificial Sequence
  Description of Artificial Sequence: Synthetic polypeptide
DASLPYLQKESVFQSGAHAYRIPALLYLPGQQSLLAFAEQRASKKDEHAELIVLRRGDYDAGTHQVQWQAQEVVAQARLDGHRSMNPCPLYDEQTGTLFLFFIAIPGQVTEQQQLQTRANVTRLCYVTSTDHGRTWSSPRDLTDAAIGPAYREWSTFAVGPGHCLQLHDRARSLVVPAYAYRKLHPKQRPIPSAFCFLSHDHGRTWARGHFVAQDTLECQVAEVETGEQRVVTLNARSHLRARVQAQSTNDGLDFQESQLVKKLVEPPPTGCQGSVISFPSPRSGPGSPAQWLLYTHPTHSWQRADLGAYLNPRPPAPEAWSEPVLLAKGSAAYSDLQSMGTGPDGSPLFGCLYEANDYEEIVFLMFTLKQAFPAEYLPQGGGGSGGGGSDKTHTCPPCPAPELLGGPSVFLFPPKPKDTLMISRTPEVTCVVVDVSHEDPEVKFNWYVDGVEVHNAKTKPREEQYNSTYRVVSVLTVLHQDWLNGKEYKCKVSNKALPAPIEKTISKAKGQPREPQVYTLPPSREEMTKNQVSLTCLVKGFYPSDIAVEWESNGQPENNYKTTPPVLDSDGSFFLYSKLTVDKSRWQQGNVFSCSVMHEALHNHYTQKSLSLSPGK

SEQ ID NO: 158 - protein, 612 aa, Artificial Sequence
  Description of Artificial Sequence: Synthetic polypeptide
DASLPYLQKESVFQSGAHAYRIPALLYLPGQQSLLAFAEQRASKKDEHAELIVLRRGDYDAGTHQVQWQAQEVVAQARLDGHRSMNPCPLYDEQTGTLFLFFIAIPGQVTEQQQLQTRANVTRLCYVTSTDHGRTWSSPRDLTDAAIGPAYREWSTFAVGPGHCLQLHDRARSLVVPAYAYRKLHPKQRPIPSAFCFLSHDHGRTWARGHFVAQDTLECQVAEVETGEQRVVTLNARSHLRARVQAQSTNDGLDFQESQLVKKLVEPPPTGCQGSVISFPSPRSGPGSPAQWLLYTHPTHSWQRADLGAYLNPRPPAPEAWSEPVLLAKGSAAYSDLQSMGTGPDGSPLFGCLYEANDYEEIVFLMFTLKQAFPAEYLPQEPKSSDKTHTCPPCPAPELLGGPSVFLFPPKPKDTLMISRTPEVTCVVVDVSHEDPEVKFNWYVDGVEVHNAKTKPREEQYNSTYRVVSVLTVLHQDWLNGKEYKCKVSNKALPAPIEKTISKAKGQPREPQVYTLPPSREEMTKNQVSLTCLVKGFYPSDIAVEWESNGQPENNYKTTPPVLDSDGSFFLYSKLTVDKSRWQQGNVFSCSVMHEALHNHYTQKSLSLSPGK

SEQ ID NO: 159 - protein, 380 aa, Artificial Sequence
  Description of Artificial Sequence: Synthetic polypeptide
DASLPYLQKESVFQSGAHAYRIPALLYLPGQQSLLAFAEQRASKKDEHAELIVLRRGDYDAGTHQVQWQAQEVVAQARLDGHRSMNPCPLYDEQTGTLFLFFIAIPGQVTEQQQLQTRANVTRLCYVTSTDHGRTWSSPRDLTDAAIGPAYREWSTFAVGPGHCLQLHDRARSLVVPAYAYRKLHPKQRPIPSAFCFLSHDHGRTWARGHFVAQDTLECQVAEVETGEQRVVTLNARSHLRFRVQAQSTNDGLDFQESQLVKKLVEPPPTGCQGSVISFPSPRSGPGSPAQWLLYTHPTHSWQRADLGAYLNPRPPAPEAWSEPVLLAKGSAAYSDLQSMGTGPDGSPLFGCLYEANDYEEIVFLMFTLKQAFPAEYLPQ

SEQ ID NO: 160 - protein, 617 aa, Artificial Sequence
  Description of Artificial Sequence: Synthetic polypeptide
DASLPYLQKESVFQSGAHAYRIPALLYLPGQQSLLAFAEQRASKKDEHAELIVLRRGDYDAGTHQVQWQAQEVVAQARLDGHRSMNPCPLYDEQTGTLFLFFIAIPGQVTEQQQLQTRANVTRLCYVTSTDHGRTWSSPRDLTDAAIGPAYREWSTFAVGPGHCLQLHDRARSLVVPAYAYRKLHPKQRPIPSAFCFLSHDHGRTWARGHFVAQDTLECQVAEVETGEQRVVTLNARSHLRFRVQAQSTNDGLDFQESQLVKKLVEPPPTGCQGSVISFPSPRSGPGSPAQWLLYTHPTHSWQRADLGAYLNPRPPAPEAWSEPVLLAKGSAAYSDLQSMGTGPDGSPLFGCLYEANDYEEIVFLMFTLKQAFPAEYLPQGGGGSGGGGSDKTHTCPPCPAPELLGGPSVFLFPPKPKDTLMISRTPEVTCVVVDVSHEDPEVKFNWYVDGVEVHNAKTKPREEQYNSTYRVVSVLTVLHQDWLNGKEYKCKVSNKALPAPIEKTISKAKGQPREPQVYTLPPSREEMTKNQVSLTCLVKGFYPSDIAVEWESNGQPENNYKTTPPVLDSDGSFFLTSKLTVDKSRWQQGNVFSCSVMHEALHNHYTQKSLSLSPGK

SEQ ID NO: 161 - protein, 612 aa, Artificial Sequence
  Description of Artificial Sequence: Synthetic polypeptide
DASLPYLQKESVFQSGAHAYRIPALLYLPGQQSLLAFAEQRASKKDEHAELIVLRRGDYDAGTHQVQWQAQEVVAQARLDGHRSMNPCPLYDEQTGTLFLFFIAIPGQVTEQQQLQTRANVTRLCYVTSTDHGRTWSSPRDLTDAAIGPAYREWSTFAVGPGHCLQLHDRARSLVVPAYAYRKLHPKQRPIPSAFCFLSHDHGRTWARGHFVAQDTLECQVAEVETGEQRVVTLNARSHLRFRVQAQSTNDGLDFQESQLVKKLVEPPPTGCQGSVISFPSPRSGPGSPAQWLLYTHPTHSWQRADLGAYLNPRPPAPEAWSEPVLLAKGSAAYSDLQSMGTGPDGSPLFGCLYEANDYEEIVFLMFTLKQAFPAEYLPQEPKSSDKTHTCPPCPAPELLGGPSVFLFPPKPKDTLMISRTPEVTCVVVDVSHEDPEVKFNWYVDGVEVHNAKTKPREEQYNSTYRVVSVLTVLHQDWLNGKEYKCKVSNKALPAPIEKTISKAKGQPREPQVYTLPPSREEMTKNQVSLTCLVKGFYPSDIAVEWESNGQPENNYKTTPPVLDSDGSFFLTSKLTVDKSRWQQGNVFSCSVMHEALHNHYTQKSLSLSPGK

SEQ ID NO: 162 - protein, 617 aa, Artificial Sequence
  Description of Artificial Sequence: Synthetic polypeptide
DASLPYLQKESVFQSGAHAYRIPALLYLPGQQSLLAFAEQRASKKDEHAELIVLRRGDYDAGTHQVQWQAQEVVAQARLDGHRSMNPCPLYDEQTGTLFLFFIAIPGQVTEQQQLQTRANVTRLCYVTSTDHGRTWSSPRDLTDAAIGPAYREWSTFAVGPGHCLQLHDRARSLVVPAYAYRKLHPKQRPIPSAFCFLSHDHGRTWARGHFVAQDTLECQVAEVETGEQRVVTLNARSHLRFRVQAQSTNDGLDFQESQLVKKLVEPPPTGCQGSVISFPSPRSGPGSPAQWLLYTHPTHSWQRADLGAYLNPRPPAPEAWSEPVLLAKGSAAYSDLQSMGTGPDGSPLFGCLYEANDYEEIVFLMFTLKQAFPAEYLPQGGGGSGGGGSDKTHTCPPCPAPELLGGPSVFLFPPKPKDTLMISRTPEVTCVVVDVSHEDPEVKFNWYVDGVEVHNAKTKPREEQYNSTYRVVSVLTVLHQDWLNGKEYKCKVSNKALPAPIEKTISKAKGQPREPQVYTLPPSREEMTKNQVSLTCLVKGFYPSDIAVEWESNGQPENNYKTTPPVLDSDGSFFLYSKLTVDKSRWQQGNVFSCSVMHEALHNHYTQKSLSLSPGK

SEQ ID NO: 163 - protein, 612 aa, Artificial Sequence
  Description of Artificial Sequence: Synthetic polypeptide
DASLPYLQKESVFQSGAHAYRIPALLYLPGQQSLLAFAEQRASKKDEHAELIVLRRGDYDAGTHQVQWQAQEVVAQARLDGHRSMNPCPLYDEQTGTLFLFFIAIPGQVTEQQQLQTRANVTRLCYVTSTDHGRTWSSPRDLTDAAIGPAYREWSTFAVGPGHCLQLHDRARSLVVPAYAYRKLHPKQRPIPSAFCFLSHDHGRTWARGHFVAQDTLECQVAEVETGEQRVVTLNARSHLRFRVQAQSTNDGLDFQESQLVKKLVEPPPTGCQGSVISFPSPRSGPGSPAQWLLYTHPTHSWQRADLGAYLNPRPPAPEAWSEPVLLAKGSAAYSDLQSMGTGPDGSPLFGCLYEANDYEEIVFLMFTLKQAFPAEYLPQEPKSSDKTHTCPPCPAPELLGGPSVFLFPPKPKDTLMISRTPEVTCVVVDVSHEDPEVKFNWYVDGVEVHNAKTKPREEQYNSTYRVVSVLTVLHQDWLNGKEYKCKVSNKALPAPIEKTISKAKGQPREPQVYTLPPSREEMTKNQVSLTCLVKGFYPSDIAVEWESNGQPENNYKTTPPVLDSDGSFFLYSKLTVDKSRWQQGNVFSCSVMHEALHNHYTQKSLSLSPGK

SEQ ID NO: 164 - protein, 608 aa, Artificial Sequence
  Description of Artificial Sequence: Synthetic polypeptide
  MOD_RES (1)..(1): Any amino acid
  MOD_RES (6)..(6): Any amino acid
  MOD_RES (9)..(9): Any amino acid
  MOD_RES (62)..(62): Any amino acid
  MOD_RES (93)..(93): Any amino acid
  MOD_RES (126)..(126): Any amino acid
  MOD_RES (187)..(187): Any amino acid
  MOD_RES (242)..(242): Any amino acid
  MOD_RES (270)..(270): Any amino acid
  MOD_RES (301)..(302): Any amino acid
  MOD_RES (332)..(332): Any amino acid
  MOD_RES (363)..(363): Any amino acid
  MOD_RES (365)..(365): Any amino acid
  MOD_RES (381)..(381): Any amino acid
XASLPXLQXESVFQSGAHAYRIPALLYLPGQQSLLAFAEQRASKKDEHAELIVLRRGDYDAXTHQVQWQAQEVVAQARLDGHRSMNPCPLYDXQTGTLFLFFIAIPGQVTEQQQLQTRANVTRLCXVTSTDHGRTWSSPRDLTDAAIGPAYREWSTFAVGPGHCLQLHDRARSLVVPAYAYRKLHPXQRPIPSAFCFLSHDHGRTWARGHFVAQDTLECQVAEVETGEQRVVTLNARSHLRXRVQAQSTNDGLDFQESQLVKKLVEPPPXGCQGSVISFPSPRSGPGSPAQWLLYTHPTHXXQRADLGAYLNPRPPAPEAWSEPVLLAKGSXAYSDLQSMGTGPDGSPLFGCLYEANDYEEIXFXMFTLKQAFPAEYLPQXDKTHTCPPCPAPELLGGPSVFLFPPKPKDTLMISRTPEVTCVVVDVSHEDPEVKFNWYVDGVEVHNAKTKPREEQYNSTYRVVSVLTVLHQDWLNGKEYKCKVSNKALPAPIEKTISKAKGQPREPQVYTLPPSREEMTKNQVSLTCLVKGFYPSDIAVEWESNGQPENNYKTTPPVLDSDGSFFLTSKLTVDKSRWQQGNVFSCSVMHEALHNHYTQKSLSLSPGK

SEQ ID NO: 165 - protein, 608 aa, Artificial Sequence
  Description of Artificial Sequence: Synthetic polypeptide
  MOD_RES (1)..(2): Any amino acid
  MOD_RES (4)..(6): Any amino acid
  MOD_RES (9)..(9): Any amino acid
  MOD_RES (44)..(45): Any amino acid
  MOD_RES (54)..(54): Any amino acid
  MOD_RES (62)..(62): Any amino acid
  MOD_RES (69)..(69): Any amino acid
  MOD_RES (78)..(78): Any amino acid
  MOD_RES (80)..(80): Any amino acid
  MOD_RES (93)..(93): Any amino acid
  MOD_RES (107)..(108): Any amino acid
  MOD_RES (112)..(112): Any amino acid
  MOD_RES (125)..(126): Any amino acid
  MOD_RES (150)..(150): Any amino acid
  MOD_RES (164)..(164): Any amino acid
  MOD_RES (170)..(171): Any amino acid
  MOD_RES (187)..(189): Any amino acid
  MOD_RES (196)..(196): Any amino acid
  MOD_RES (213)..(213): Any amino acid
  MOD_RES (217)..(217): Any amino acid
  MOD_RES (225)..(225): Any amino acid
  MOD_RES (239)..(242): Any amino acid
  MOD_RES (244)..(244): Any amino acid
  MOD_RES (249)..(249): Any amino acid
  MOD_RES (251)..(251): Any amino acid
  MOD_RES (257)..(258): Any amino acid
  MOD_RES (260)..(260): Any amino acid
  MOD_RES (265)..(265): Any amino acid
  MOD_RES (270)..(270): Any amino acid
  MOD_RES (272)..(272): Any amino acid
  MOD_RES (292)..(292): Any amino acid
  MOD_RES (301)..(302): Any amino acid
  MOD_RES (325)..(325): Any amino acid
  MOD_RES (332)..(332): Any amino acid
  MOD_RES (352)..(352): Any amino acid
  MOD_RES (363)..(363): Any amino acid
  MOD_RES (365)..(365): Any amino acid
  MOD_RES (381)..(381): Any amino acid
XXSXXXLQXESVFQSGAHAYRIPALLYLPGQQSLLAFAEQRASXXDEHAELIVXRRGDYDAXTHQVQWXAQEVVAQAXLXGHRSMNPCPLYDXQTGTLFLFFIAIPXXVTEXQQLQTRANVTRLXXVTSTDHGRTWSSPRDLTDAAIGPXYREWSTFAVGPGHXLQLHDXXRSLVVPAYAYRKLHPXXXPIPSAFXFLSHDHGRTWARGHFVXQDTXECQVAEVXTGEQRVVTLNARSXXXXRXQAQSXNXGLDFQXXQXVKKLXEPPPXGXQGSVISFPSPRSGPGSPAQXLLYTHPTHXXQRADLGAYLNPRPPAPEAWSEPXLLAKGSXAYSDLQSMGTGPDGSPLFGXLYEANDYEEIXFXMFTLKQAFPAEYLPQXDKTHTCPPCPAPELLGGPSVFLFPPKPKDTLMISRTPEVTCVVVDVSHEDPEVKFNWYVDGVEVHNAKTKPREEQYNSTYRVVSVLTVLHQDWLNGKEYKCKVSNKALPAPIEKTISKAKGQPREPQVYTLPPSREEMTKNQVSLTCLVKGFYPSDIAVEWESNGQPENNYKTTPPVLDSDGSFFLTSKLTVDKSRWQQGNVFSCSVMHEALHNHYTQKSLSLSPGK

SEQ ID NO: 166 - protein, 874 aa, Artificial Sequence
  Description of Artificial Sequence: Synthetic polypeptide
DASLPYLQKESVFQSGAHAYRIPALLYLPGQQSLLAFAEQRASKKDEHAELIVLRRGDYDAGTHQVQWQAQEVVAQARLDGHRSMNPCPLYDEQTGTLFLFFIAIPGQVTEQQQLQTRANVTRLCQVTSTDHGRTWSSPRDLTDAAIGPAYREWSTFAVGPGHCLQLHDRARSLVVPAYAYRKLHPKQRPIPSAFCFLSHDHGRTWARGHFVAQDTLECQVAEVETGEQRVVTLNARSHLRARVQAQSTNDGLDFQESQLVKKLVEPPPQGCQGSVISFPSPRSGPGSPAQWLLYTHPTHARQRADLGAYLNPRPPAPEAWSEPVLLAKGSAAYSDLQSMGTGPDGSPLFGCLYEANDYEEIVFLMFTLKQAFPAEYLPQGGGGSGGGGSDKTHTCPPCPAPELLGGPSVFLFPPKPKDTLMISRTPEVTCVVVDVSHEDPEVKFNWYVDGVEVHNAKTKPREEQYNSTYRVVSVLTVLHQDWLNGKEYKCKVSNKALPAPIEKTISKAKGQPREPQVYTLPPSREEMTKNQVSLTCLVKGFYPSDIAVEWESNGQPENNYKTTPPVLDSDGSFFLYSKLTVDKSRWQQGNVFSCSVMHEALHNHYTQKSLSLSPGKGGGGSGGGGSGGGGSEVQLVESGGGLVQPGGSLRLSCAASGFNIKDTYIHWVRQAPGKGLEWVARIYPTNGYTRYADSVKGRFTISADTSKNTAYLQMNSLRAEDTAVYYCSRWGGDGFYAMDYWGQGTLVTVSSGGGGSGGGGSGGGGSDIQMTQSPSSLSASVGDRVTITCRASQDVNTAVAWYQQKPGKAPKLLIYSASFLYSGVPSRFSGSRSGTDFTLTISSLQPEDFATYYCQQHYTTPPTFGQGTKVEIK

SEQ ID NO: 167 - protein, 874 aa, Artificial Sequence
  Description of Artificial Sequence: Synthetic polypeptide
DASLPYLQKESVFQSGAHAYRIPALLYLPGQQSLLAFAEQRASKKDEHAELIVLRRGDYDAGTHQVQWQAQEVVAQARLDGHRSMNPCPLYDEQTGTLFLFFIAIPGQVTEQQQLQTRANVTRLCYVTSTDHGRTWSSPRDLTDAAIGPAYREWSTFAVGPGHCLQLHDRARSLVVPAYAYRKLHPKQRPIPSAFCFLSHDHGRTWARGHFVAQDTLECQVAEVETGEQRVVTLNARSHLRARVQAQSTNDGLDFQESQLVKKLVEPPPTGCQGSVISFPSPRSGPGSPAQWLLYTHPTHSWQRADLGAYLNPRPPAPEAWSEPVLLAKGSAAYSDLQSMGTGPDGSPLFGCLYEANDYEEIVFLMFTLKQAFPAEYLPQGGGGSGGGGSDKTHTCPPCPAPELLGGPSVFLFPPKPKDTLMISRTPEVTCVVVDVSHEDPEVKFNWYVDGVEVHNAKTKPREEQYNSTYRVVSVLTVLHQDWLNGKEYKCKVSNKALPAPIEKTISKAKGQPREPQVYTLPPSREEMTKNQVSLTCLVKGFYPSDIAVEWESNGQPENNYKTTPPVLDSDGSFFLYSKLTVDKSRWQQGNVFSCSVMHEALHNHYTQKSLSLSPGKGGGGSGGGGSGGGGSEVQLVESGGGLVQPGGSLRLSCAASGFNIKDTYIHWVRQAPGKGLEWVARIYPTNGYTRYADSVKGRFTISADTSKNTAYLQMNSLRAEDTAVYYCSRWGGDGFYAMDYWGQGTLVTVSSGGGGSGGGGSGGGGSDIQMTQSPSSLSASVGDRVTITCRASQDVNTAVAWYQQKPGKAPKLLIYSASFLYSGVPSRFSGSRSGTDFTLTISSLQPEDFATYYCQQHYTTPPTFGQGTKVEIK

SEQ ID NO: 168 - protein, 874 aa, Artificial Sequence
  Description of Artificial Sequence: Synthetic polypeptide
DASLPYLQKESVFQSGAHAYRIPALLYLPGQQSLLAFAEQRASKKDEHAELIVLRRGDYDAGTHQVQWQAQEVVAQARLDGHRSMNPCPLYDEQTGTLFLFFIAIPGQVTEQQQLQTRANVTRLCYVTSTDHGRTWSSPRDLTDAAIGPAYREWSTFAVGPGHCLQLHDRARSLVVPAYAYRKLHPKQRPIPSAFCFLSHDHGRTWARGHFVAQDTLECQVAEVETGEQRVVTLNARSHLRFRVQAQSTNDGLDFQESQLVKKLVEPPPTGCQGSVISFPSPRSGPGSPAQWLLYTHPTHSWQRADLGAYLNPRPPAPEAWSEPVLLAKGSAAYSDLQSMGTGPDGSPLFGCLYEANDYEEIVFLMFTLKQAFPAEYLPQGGGGSGGGGSDKTHTCPPCPAPELLGGPSVFLFPPKPKDTLMISRTPEVTCVVVDVSHEDPEVKFNWYVDGVEVHNAKTKPREEQYNSTYRVVSVLTVLHQDWLNGKEYKCKVSNKALPAPIEKTISKAKGQPREPQVYTLPPSREEMTKNQVSLTCLVKGFYPSDIAVEWESNGQPENNYKTTPPVLDSDGSFFLYSKLTVDKSRWQQGNVFSCSVMHEALHNHYTQKSLSLSPGKGGGGSGGGGSGGGGSEVQLVESGGGLVQPGGSLRLSCAASGFNIKDTYIHWVRQAPGKGLEWVARIYPTNGYTRYADSVKGRFTISADTSKNTAYLQMNSLRAEDTAVYYCSRWGGDGFYAMDYWGQGTLVTVSSGGGGSGGGGSGGGGSDIQMTQSPSSLSASVGDRVTITCRASQDVNTAVAWYQQKPGKAPKLLIYSASFLYSGVPSRFSGSRSGTDFTLTISSLQPEDFATYYCQQHYTTPPTFGQGTKVEIK

SEQ ID NO: 169 - protein, 869 aa, Artificial Sequence
  Description of Artificial Sequence: Synthetic polypeptide
DASLPYLQKESVFQSGAHAYRIPALLYLPGQQSLLAFAEQRASKKDEHAELIVLRRGDYDAGTHQVQWQAQEVVAQARLDGHRSMNPCPLYDEQTGTLFLFFIAIPGQVTEQQQLQTRANVTRLCQVTSTDHGRTWSSPRDLTDAAIGPAYREWSTFAVGPGHCLQLHDRARSLVVPAYAYRKLHPKQRPIPSAFCFLSHDHGRTWARGHFVAQDTLECQVAEVETGEQRVVTLNARSHLRARVQAQSTNDGLDFQESQLVKKLVEPPPQGCQGSVISFPSPRSGPGSPAQWLLYTHPTHSWQRADLGAYLNPRPPAPEAWSEPVLLAKGSAAYSDLQSMGTGPDGSPLFGCLYEANDYEEIVFLMFTLKQAFPAEYLPQEPKSSDKTHTCPPCPAPELLGGPSVFLFPPKPKDTLMISRTPEVTCVVVDVSHEDPEVKFNWYVDGVEVHNAKTKPREEQYNSTYRVVSVLTVLHQDWLNGKEYKCKVSNKALPAPIEKTISKAKGQPREPQVYTLPPSREEMTKNQVSLTCLVKGFYPSDIAVEWESNGQPENNYKTTPPVLDSDGSFFLYSKLTVDKSRWQQGNVFSCSVMHEALHNHYTQKSLSLSPGKGGGGSGGGGSGGGGSEVQLVESGGGLVQPGGSLRLSCAASGFNIKDTYIHWVRQAPGKGLEWVARIYPTNGYTRYADSVKGRFTISADTSKNTAYLQMNSLRAEDTAVYYCSRWGGDGFYAMDYWGQGTLVTVSSGGGGSGGGGSGGGGSDIQMTQSPSSLSASVGDRVTITCRASQDVNTAVAWYQQKPGKAPKLLIYSASFLYSGVPSRFSGSRSGTDFTLTISSLQPEDFATYYCQQHYTTPPTFGQGTKVEIK

SEQ ID NO: 170 - protein, 869 aa, Artificial Sequence
  Description of Artificial Sequence: Synthetic polypeptide
DASLPYLQDESVFQSGAHAYRIPALLYLPGQQSLLAFAEQRASKKDEHAELIVLRRGDYDAPTHQVQWQAQEVVAQARLDGHRSMNPCPLYDEQTGTLFLFFIAIPGQVTEQQQLQTRANVTRLCQVTSTDHGRTWSSPRDLTDAAIGPAYREWSTFAVGPGHCLQLHDRARSLVVPAYAYRKLHPKQRPIPSAFCFLSHDHGRTWARGHFVAQDTLECQVAEVETGEQRVVTLNARSHLRARVQAQSTNDGLDFQESQLVKKLVEPPPQGCQGSVISFPSPRSGPGSPAQWLLYTHPTHSWQRADLGAYLNPRPPAPEAWSEPVLLAKGSAAYSDLQSMGTGPDGSPLFGCLYEANDYEEIRFIMFTLKQAFPAEYLPQEPKSSDKTHTCPPCPAPELLGGPSVFLFPPKPKDTLMISRTPEVTCVVVDVSHEDPEVKFNWYVDGVEVHNAKTKPREEQYNSTYRVVSVLTVLHQDWLNGKEYKCKVSNKALPAPIEKTISKAKGQPREPQVYTLPPSREEMTKNQVSLTCLVKGFYPSDIAVEWESNGQPENNYKTTPPVLDSDGSFFLYSKLTVDKSRWQQGNVFSCSVMHEALHNHYTQKSLSLSPGKGGGGSGGGGSGGGGSEVQLVESGGGLVQPGGSLRLSCAASGFNIKDTYIHWVRQAPGKGLEWVARIYPTNGYTRYADSVKGRFTISADTSKNTAYLQMNSLRAEDTAVYYCSRWGGDGFYAMDYWGQGTLVTVSSGGGGSGGGGSGGGGSDIQMTQSPSSLSASVGDRVTITCRASQDVNTAVAWYQQKPGKAPKLLIYSASFLYSGVPSRFSGSRSGTDFTLTISSLQPEDFATYYCQQHYTTPPTFGQGTKVEIK

SEQ ID NO: 171 - protein, 869 aa, Artificial Sequence
  Description of Artificial Sequence: Synthetic polypeptide
DASLPYLQKESVFQSGAHAYRIPALLYLPGQQSLLAFAEQRASKKDEHAELIVLRRGDYDANTHQVQWQAQEVVAQARLDGHRSMNPCPLYDAQTGTLFLFFIAIPGQVTEQQQLQTRANVTRLCQVTSTDHGRTWSSPRDLTDAAIGPAYREWSTFAVGPGHCLQLHDRARSLVVPAYAYRKLHPKQRPIPSAFCFLSHDHGRTWARGHFVAQDTLECQVAEVETGEQRVVTLNARSHLRARVQAQSTNDGLDFQESQLVKKLVEPPPQGCQGSVISFPSPRSGPGSPAQWLLYTHPTHSWQRADLGAYLNPRPPAPEAWSEPVLLAKGSAAYSDLQSMGTGPDGSPLFGCLYEANDYEEIVFLMFTLKQAFPAEYLPQEPKSSDKTHTCPPCPAPELLGGPSVFLFPPKPKDTLMISRTPEVTCVVVDVSHEDPEVKFNWYVDGVEVHNAKTKPREEQYNSTYRVVSVLTVLHQDWLNGKEYKCKVSNKALPAPIEKTISKAKGQPREPQVYTLPPSREEMTKNQVSLTCLVKGFYPSDIAVEWESNGQPENNYKTTPPVLDSDGSFFLYSKLTVDKSRWQQGNVFSCSVMHEALHNHYTQKSLSLSPGKGGGGSGGGGSGGGGSEVQLVESGGGLVQPGGSLRLSCAASGFNIKDTYIHWVRQAPGKGLEWVARIYPTNGYTRYADSVKGRFTISADTSKNTAYLQMNSLRAEDTAVYYCSRWGGDGFYAMDYWGQGTLVTVSSGGGGSGGGGSGGGGSDIQMTQSPSSLSASVGDRVTITCRASQDVNTAVAWYQQKPGKAPKLLIYSASFLYSGVPSRFSGSRSGTDFTLTISSLQPEDFATYYCQQHYTTPPTFGQGTKVEIK

SEQ ID NO: 172 - protein, 869 aa, Artificial Sequence
  Description of Artificial Sequence: Synthetic polypeptide
DASLPYLQKESVFQSGAHAYRIPALLYLPGQQSLLAFAEQRASKKDEHAELIVLRRGDYDAPTHQVQWQAQEVVAQARLDGHRSMNPCPLYDAQTGTLFLFFIAIPGQVTEQQQLQTRANVTRLCQVTSTDHGRTWSSPRDLTDAAIGPAYREWSTFAVGPGHCLQLHDRARSLVVPAYAYRKLHPKQRPIPSAFCFLSHDHGRTWARGHFVAQDTLECQVAEVETGEQRVVTLNARSHLRARVQAQSTNDGLDFQESQLVKKLVEPPPAGCQGSVISFPSPRSGPGSPAQWLLYTHPTHRKQRADLGAYLNPRPPAPEAWSEPVLLAKGSAAYSDLQSMGTGPDGSPLFGCLYEANDYEEIVFLMFTLKQAFPAEYLPQEPKSSDKTHTCPPCPAPELLGGPSVFLFPPKPKDTLMISRTPEVTCVVVDVSHEDPEVKFNWYVDGVEVHNAKTKPREEQYNSTYRVVSVLTVLHQDWLNGKEYKCKVSNKALPAPIEKTISKAKGQPREPQVYTLPPSREEMTKNQVSLTCLVKGFYPSDIAVEWESNGQPENNYKTTPPVLDSDGSFFLYSKLTVDKSRWQQGNVFSCSVMHEALHNHYTQKSLSLSPGKGGGGSGGGGSGGGGSEVQLVESGGGLVQPGGSLRLSCAASGFNIKDTYIHWVRQAPGKGLEWVARIYPTNGYTRYADSVKGRFTISADTSKNTAYLQMNSLRAEDTAVYYCSRWGGDGFYAMDYWGQGTLVTVSSGGGGSGGGGSGGGGSDIQMTQSPSSLSASVGDRVTITCRASQDVNTAVAWYQQKPGKAPKLLIYSASFLYSGVPSRFSGSRSGTDFTLTISSLQPEDFATYYCQQHYTTPPTFGQGTKVEIK

SEQ ID NO: 173 - protein, 869 aa, Artificial Sequence
  Description of Artificial Sequence: Synthetic polypeptide
DASLPYLQKESVFQSGAHAYRIPALLYLPGQQSLLAFAEQRASKKDEHAELIVLRRGDYDASTHQVQWQAQEVVAQARLDGHRSMNPCPLYDAQTGTLFLFFIAIPGQVTEQQQLQTRANVTRLCQVTSTDHGRTWSSPRDLTDAAIGPAYREWSTFAVGPGHCLQLHDRARSLVVPAYAYRKLHPKQRPIPSAFCFLSHDHGRTWARGHFVAQDTLECQVAEVETGEQRVVTLNARSHLRARVQAQSTNDGLDFQESQLVKKLVEPPPAGCQGSVISFPSPRSGPGSPAQWLLYTHPTHRKQRADLGAYLNPRPPAPEAWSEPVLLAKGSAAYSDLQSMGTGPDGSPLFGCLYEANDYEEIVFLMFTLKQAFPAEYLPQEPKSSDKTHTCPPCPAPELLGGPSVFLFPPKPKDTLMISRTPEVTCVVVDVSHEDPEVKFNWYVDGVEVHNAKTKPREEQYNSTYRVVSVLTVLHQDWLNGKEYKCKVSNKALPAPIEKTISKAKGQPREPQVYTLPPSREEMTKNQVSLTCLVKGFYPSDIAVEWESNGQPENNYKTTPPVLDSDGSFFLYSKLTVDKSRWQQGNVFSCSVMHEALHNHYTQKSLSLSPGKGGGGSGGGGSGGGGSEVQLVESGGGLVQPGGSLRLSCAASGFNIKDTYIHWVRQAPGKGLEWVARIYPTNGYTRYADSVKGRFTISADTSKNTAYLQMNSLRAEDTAVYYCSRWGGDGFYAMDYWGQGTLVTVSSGGGGSGGGGSGGGGSDIQMTQSPSSLSASVGDRVTITCRASQDVNTAVAWYQQKPGKAPKLLIYSASFLYSGVPSRFSGSRSGTDFTLTISSLQPEDFATYYCQQHYTTPPTFGQGTKVEIK

SEQ ID NO: 174 - protein, 869 aa, Artificial Sequence
  Description of Artificial Sequence: Synthetic polypeptide
DASLPYLQKESVFQSGAHAYRIPALLYLPGQQSLLAFAEQRASKKDEHAELIVLRRGDYDATTHQVQWQAQEVVAQARLDGHRSMNPCPLYDAQTGTLFLFFIAIPGQVTEQQQLQTRANVTRLCQVTSTDHGRTWSSPRDLTDAAIGPAYREWSTFAVGPGHCLQLHDRARSLVVPAYAYRKLHPKQRPIPSAFCFLSHDHGRTWARGHFVAQDTLECQVAEVETGEQRVVTLNARSHLRARVQAQSTNDGLDFQESQLVKKLVEPPPAGCQGSVISFPSPRSGPGSPAQWLLYTHPTHRKQRADLGAYLNPRPPAPEAWSEPVLLAKGSAAYSDLQSMGTGPDGSPLFGCLYEANDYEEIVFLMFTLKQAFPAEYLPQEPKSSDKTHTCPPCPAPELLGGPSVFLFPPKPKDTLMISRTPEVTCVVVDVSHEDPEVKFNWYVDGVEVHNAKTKPREEQYNSTYRVVSVLTVLHQDWLNGKEYKCKVSNKALPAPIEKTISKAKGQPREPQVYTLPPSREEMTKNQVSLTCLVKGFYPSDIAVEWESNGQPENNYKTTPPVLDSDGSFFLYSKLTVDKSRWQQGNVFSCSVMHEALHNHYTQKSLSLSPGKGGGGSGGGGSGGGGSEVQLVESGGGLVQPGGSLRLSCAASGFNIKDTYIHWVRQAPGKGLEWVARIYPTNGYTRYADSVKGRFTISADTSKNTAYLQMNSLRAEDTAVYYCSRWGGDGFYAMDYWGQGTLVTVSSGGGGSGGGGSGGGGSDIQMTQSPSSLSASVGDRVTITCRASQDVNTAVAWYQQKPGKAPKLLIYSASFLYSGVPSRFSGSRSGTDFTLTISSLQPEDFATYYCQQHYTTPPTFGQGTKVEIK

SEQ ID NO: 175 - protein, 869 aa, Artificial Sequence
  Description of Artificial Sequence: Synthetic polypeptide
DASLPYLQKESVFQSGAHAYRIPALLYLPGQQSLLAFAEQRASKKDEHAELIVLRRGDYDANTHQVQWQAQEVVAQARLDGHRSMNPCPLYDAQTGTLFLFFIAIPGQVTEQQQLQTRANVTRLCQVTSTDHGRTWSSPRDLTDAAIGPAYREWSTFAVGPGHCLQLHDRARSLVVPAYAYRKLHPKQRPIPSAFCFLSHDHGRTWARGHFVAQDTLECQVAEVETGEQRVVTLNARSHLRARVQAQSTNDGLDFQESQLVKKLVEPPPAGCQGSVISFPSPRSGPGSPAQWLLYTHPTHRKQRADLGAYLNPRPPAPEAWSEPVLLAKGSAAYSDLQSMGTGPDGSPLFGCLYEANDYEEIVFLMFTLKQAFPAEYLPQEPKSSDKTHTCPPCPAPELLGGPSVFLFPPKPKDTLMISRTPEVTCVVVDVSHEDPEVKFNWYVDGVEVHNAKTKPREEQYNSTYRVVSVLTVLHQDWLNGKEYKCKVSNKALPAPIEKTISKAKGQPREPQVYTLPPSREEMTKNQVSLTCLVKGFYPSDIAVEWESNGQPENNYKTTPPVLDSDGSFFLYSKLTVDKSRWQQGNVFSCSVMHEALHNHYTQKSLSLSPGKGGGGSGGGGSGGGGSEVQLVESGGGLVQPGGSLRLSCAASGFNIKDTYIHWVRQAPGKGLEWVARIYPTNGYTRYADSVKGRFTISADTSKNTAYLQMNSLRAEDTAVYYCSRWGGDGFYAMDYWGQGTLVTVSSGGGGSGGGGSGGGGSDIQMTQSPSSLSASVGDRVTITCRASQDVNTAVAWYQQKPGKAPKLLIYSASFLYSGVPSRFSGSRSGTDFTLTISSLQPEDFATYYCQQHYTTPPTFGQGTKVEIK

SEQ ID NO: 176 - protein, 869 aa, Artificial Sequence
  Description of Artificial Sequence: Synthetic polypeptide
DASLPYLQKESVFQSGAHAYRIPALLYLPGQQSLLAFAEQRASKKDEHAELIVLRRGDYDAGTHQVQWQAQEVVAQARLDGHRSMNPCPLYDEQTGTLFLFFIAIPGQVTEQQQLQTRANVTRLCQVTSTDHGRTWSSPRDLTDAAIGPAYREWSTFAVGPGHCLQLHDRARSLVVPAYAYRKLHPKQRPIPSAFCFLSHDHGRTWARGHFVAQDTLECQVAEVETGEQRVVTLNARSHLRARVQAQSTNDGLDFQESQLVKKLVEPPPQGCQGSVISFPSPRSGPGSPAQWLLYTHPTHARQRADLGAYLNPRPPAPEAWSEPVLLAKGSAAYSDLQSMGTGPDGSPLFGCLYEANDYEEIVFLMFTLKQAFPAEYLPQEPKSSDKTHTCPPCPAPELLGGPSVFLFPPKPKDTLMISRTPEVTCVVVDVSHEDPEVKFNWYVDGVEVHNAKTKPREEQYNSTYRVVSVLTVLHQDWLNGKEYKCKVSNKALPAPIEKTISKAKGQPREPQVYTLPPSREEMTKNQVSLTCLVKGFYPSDIAVEWESNGQPENNYKTTPPVLDSDGSFFLYSKLTVDKSRWQQGNVFSCSVMHEALHNHYTQKSLSLSPGKGGGGSGGGGSGGGGSEVQLVESGGGLVQPGGSLRLSCAASGFNIKDTYIHWVRQAPGKGLEWVARIYPTNGYTRYADSVKGRFTISADTSKNTAYLQMNSLRAEDTAVYYCSRWGGDGFYAMDYWGQGTLVTVSSGGGGSGGGGSGGGGSDIQMTQSPSSLSASVGDRVTITCRASQDVNTAVAWYQQKPGKAPKLLIYSASFLYSGVPSRFSGSRSGTDFTLTISSLQPEDFATYYCQQHYTTPPTFGQGTKVEIK

SEQ ID NO: 177 - protein, 869 aa, Artificial Sequence
  Description of Artificial Sequence: Synthetic polypeptide
DASLPYLQKESVFQSGAHAYRIPALLYLPGQQSLLAFAEQRASKKDEHAELIVLRRGDYDAGTHQVQWQAQEVVAQARLDGHRSMNPCPLYDEQTGTLFLFFIAIPGQVTEQQQLQTRANVTRLCYVTSTDHGRTWSSPRDLTDAAIGPAYREWSTFAVGPGHCLQLHDRARSLVVPAYAYRKLHPKQRPIPSAFCFLSHDHGRTWARGHFVAQDTLECQVAEVETGEQRVVTLNARSHLRARVQAQSTNDGLDFQESQLVKKLVEPPPTGCQGSVISFPSPRSGPGSPAQWLLYTHPTHSWQRADLGAYLNPRPPAPEAWSEPVLLAKGSAAYSDLQSMGTGPDGSPLFGCLYEANDYEEIVFLMFTLKQAFPAEYLPQEPKSSDKTHTCPPCPAPELLGGPSVFLFPPKPKDTLMISRTPEVTCVVVDVSHEDPEVKFNWYVDGVEVHNAKTKPREEQYNSTYRVVSVLTVLHQDWLNGKEYKCKVSNKALPAPIEKTISKAKGQPREPQVYTLPPSREEMTKNQVSLTCLVKGFYPSDIAVEWESNGQPENNYKTTPPVLDSDGSFFLYSKLTVDKSRWQQGNVFSCSVMHEALHNHYTQKSLSLSPGKGGGGSGGGGSGGGGSEVQLVESGGGLVQPGGSLRLSCAASGFNIKDTYIHWVRQAPGKGLEWVARIYPTNGYTRYADSVKGRFTISADTSKNTAYLQMNSLRAEDTAVYYCSRWGGDGFYAMDYWGQGTLVTVSSGGGGSGGGGSGGGGSDIQMTQSPSSLSASVGDRVTITCRASQDVNTAVAWYQQKPGKAPKLLIYSASFLYSGVPSRFSGSRSGTDFTLTISSLQPEDFATYYCQQHYTTPPTFGQGTKVEIK

SEQ ID NO: 178 - protein, 869 aa, Artificial Sequence
  Description of Artificial Sequence: Synthetic polypeptide
DASLPYLQKESVFQSGAHAYRIPALLYLPGQQSLLAFAEQRASKKDEHAELIVLRRGDYDAGTHQVQWQAQEVVAQARLDGHRSMNPCPLYDEQTGTLFLFFIAIPGQVTEQQQLQTRANVTRLCYVTSTDHGRTWSSPRDLTDAAIGPAYREWSTFAVGPGHCLQLHDRARSLVVPAYAYRKLHPKQRPIPSAFCFLSHDHGRTWARGHFVAQDTLECQVAEVETGEQRVVTLNARSHLRFRVQAQSTNDGLDFQESQLVKKLVEPPPTGCQGSVISFPSPRSGPGSPAQWLLYTHPTHSWQRADLGAYLNPRPPAPEAWSEPVLLAKGSAAYSDLQSMGTGPDGSPLFGCLYEANDYEEIVFLMFTLKQAFPAEYLPQEPKSSDKTHTCPPCPAPELLGGPSVFLFPPKPKDTLMISRTPEVTCVVVDVSHEDPEVKFNWYVDGVEVHNAKTKPREEQYNSTYRVVSVLTVLHQDWLNGKEYKCKVSNKALPAPIEKTISKAKGQPREPQVYTLPPSREEMTKNQVSLTCLVKGFYPSDIAVEWESNGQPENNYKTTPPVLDSDGSFFLYSKLTVDKSRWQQGNVFSCSVMHEALHNHYTQKSLSLSPGKGGGGSGGGGSGGGGSEVQLVESGGGLVQPGGSLRLSCAASGFNIKDTYIHWVRQAPGKGLEWVARIYPTNGYTRYADSVKGRFTISADTSKNTAYLQMNSLRAEDTAVYYCSRWGGDGFYAMDYWGQGTLVTVSSGGGGSGGGGSGGGGSDIQMTQSPSSLSASVGDRVTITCRASQDVNTAVAWYQQKPGKAPKLLIYSASFLYSGVPSRFSGSRSGTDFTLTISSLQPEDFATYYCQQHYTTPPTFGQGTKVEIK

SEQ ID NO: 179 - protein, 865 aa, Artificial Sequence
  Description of Artificial Sequence: Synthetic polypeptide
  MOD_RES (1)..(1): Any amino acid
  MOD_RES (6)..(6): Any amino acid
  MOD_RES (9)..(9): Any amino acid
  MOD_RES (62)..(62): Any amino acid
  MOD_RES (93)..(93): Any amino acid
  MOD_RES (126)..(126): Any amino acid
  MOD_RES (187)..(187): Any amino acid
  MOD_RES (242)..(242): Any amino acid
  MOD_RES (270)..(270): Any amino acid
  MOD_RES (301)..(302): Any amino acid
  MOD_RES (332)..(332): Any amino acid
  MOD_RES (363)..(363): Any amino acid
  MOD_RES (365)..(365): Any amino acid
  MOD_RES (381)..(381): Any amino acid
XASLPXLQXESVFQSGAHAYRIPALLYLPGQQSLLAFAEQRASKKDEHAELIVLRRGDYDAXTHQVQWQAQEVVAQARLDGHRSMNPCPLYDXQTGTLFLFFIAIPGQVTEQQQLQTRANVTRLCXVTSTDHGRTWSSPRDLTDAAIGPAYREWSTFAVGPGHCLQLHDRARSLVVPAYAYRKLHPXQRPIPSAFCFLSHDHGRTWARGHFVAQDTLECQVAEVETGEQRVVTLNARSHLRXRVQAQSTNDGLDFQESQLVKKLVEPPPXGCQGSVISFPSPRSGPGSPAQWLLYTHPTHXXQRADLGAYLNPRPPAPEAWSEPVLLAKGSXAYSDLQSMGTGPDGSPLFGCLYEANDYEEIXFXMFTLKQAFPAEYLPQXDKTHTCPPCPAPELLGGPSVFLFPPKPKDTLMISRTPEVTCVVVDVSHEDPEVKFNWYVDGVEVHNAKTKPREEQYNSTYRVVSVLTVLHQDWLNGKEYKCKVSNKALPAPIEKTISKAKGQPREPQVYTLPPSREEMTKNQVSLTCLVKGFYPSDIAVEWESNGQPENNYKTTPPVLDSDGSFFLYSKLTVDKSRWQQGNVFSCSVMHEALHNHYTQKSLSLSPGKGGGGSGGGGSGGGGSEVQLVESGGGLVQPGGSLRLSCAASGFNIKDTYIHWVRQAPGKGLEWVARIYPTNGYTRYADSVKGRFTISADTSKNTAYLQMNSLRAEDTAVYYCSRWGGDGFYAMDYWGQGTLVTVSSGGGGSGGGGSGGGGSDIQMTQSPSSLSASVGDRVTITCRASQDVNTAVAWYQQKPGKAPKLLIYSASFLYSGVPSRFSGSRSGTDFTLTISSLQPEDFATYYCQQHYTTPPTFGQGTKVEIK

SEQ ID NO: 180 - protein, 865 aa, Artificial Sequence
  Description of Artificial Sequence: Synthetic polypeptide
  MOD_RES (1)..(2): Any amino acid
  MOD_RES (4)..(6): Any amino acid
  MOD_RES (9)..(9): Any amino acid
  MOD_RES (44)..(45): Any amino acid
  MOD_RES (54)..(54): Any amino acid
  MOD_RES (62)..(62): Any amino acid
  MOD_RES (69)..(69): Any amino acid
  MOD_RES (78)..(78): Any amino acid
  MOD_RES (80)..(80): Any amino acid
  MOD_RES (93)..(93): Any amino acid
  MOD_RES (107)..(108): Any amino acid
  MOD_RES (112)..(112): Any amino acid
  MOD_RES (125)..(126): Any amino acid
  MOD_RES (150)..(150): Any amino acid
  MOD_RES (164)..(164): Any amino acid
  MOD_RES (170)..(171): Any amino acid
  MOD_RES (187)..(189): Any amino acid
  MOD_RES (196)..(196): Any amino acid
  MOD_RES (213)..(213): Any amino acid
  MOD_RES (217)..(217): Any amino acid
  MOD_RES (225)..(225): Any amino acid
  MOD_RES (239)..(242): Any amino acid
  MOD_RES (244)..(244): Any amino acid
  MOD_RES (249)..(249): Any amino acid
  MOD_RES (251)..(251): Any amino acid
  MOD_RES (257)..(258): Any amino acid
  MOD_RES (260)..(260): Any amino acid
  MOD_RES (265)..(265): Any amino acid
  MOD_RES (270)..(270): Any amino acid
  MOD_RES (272)..(272): Any amino acid
  MOD_RES (292)..(292): Any amino acid
  MOD_RES (301)..(302): Any amino acid
  MOD_RES (325)..(325): Any amino acid
  MOD_RES (332)..(332): Any amino acid
  MOD_RES (352)..(352): Any amino acid
  MOD_RES (363)..(363): Any amino acid
  MOD_RES (365)..(365): Any amino acid
  MOD_RES (381)..(381): Any amino acid
XXSXXXLQXESVFQSGAHAYRIPALLYLPGQQSLLAFAEQRASXXDEHAELIVXRRGDYDAXTHQVQWXAQEVVAQAXLXGHRSMNPCPLYDXQTGTLFLFFIAIPXXVTEXQQLQTRANVTRLXXVTSTDHGRTWSSPRDLTDAAIGPXYREWSTFAVGPGHXLQLHDXXRSLVVPAYAYRKLHPXXXPIPSAFXFLSHDHGRTWARGHFVXQDTXECQVAEVXTGEQRVVTLNARSXXXXRXQAQSXNXGLDFQXXQXVKKLXEPPPXGXQGSVISFPSPRSGPGSPAQXLLYTHPTHXXQRADLGAYLNPRPPAPEAWSEPXLLAKGSXAYSDLQSMGTGPDGSPLFGXLYEANDYEEIXFXMFTLKQAFPAEYLPQXDKTHTCPPCPAPELLGGPSVFLFPPKPKDTLMISRTPEVTCVVVDVSHEDPEVKFNWYVDGVEVHNAKTKPREEQYNSTYRVVSVLTVLHQDWLNGKEYKCKVSNKALPAPIEKTISKAKGQPREPQVYTLPPSREEMTKNQVSLTCLVKGFYPSDIAVEWESNGQPENNYKTTPPVLDSDGSFFLYSKLTVDKSRWQQGNVFSCSVMHEALHNHYTQKSLSLSPGKGGGGSGGGGSGGGGSEVQLVESGGGLVQPGGSLRLSCAASGFNIKDTYIHWVRQAPGKGLEWVARIYPTNGYTRYADSVKGRFTISADTSKNTAYLQMNSLRAEDTAVYYCSRWGGDGFYAMDYWGQGTLVTVSSGGGGSGGGGSGGGGSDIQMTQSPSSLSASVGDRVTITCRASQDVNTAVAWYQQKPGKAPKLLIYSASFLYSGVPSRFSGSRSGTDFTLTISSLQPEDFATYYCQQHYTTPPTFGQGTKVEIK

SEQ ID NO: 181 - DNA, 1140 bp, Artificial Sequence
  Description of Artificial Sequence: Synthetic polynucleotide
gatgcatctctgccttacctgcagaaagaaagcgtgttccagtctggcgcccacgcctacagaattcccgctctgctgtatctgccaggccagcagtctctgctggctttcgctgaacagcgggccagcaagaaggatgagcacgccgaactgatcgtgctgcggagaggcgattacgacgccggcacacatcaggtgcagtggcaggctcaagaggtggtggctcaggctagactggacggccacagatctatgaacccctgtcctctgtacgatgaacagaccggcacactgtttctgttctttatcgctatccccggccaagtgaccgagcagcagcagctgcagacaagagccaacgtgaccagactgtgttacgtgacctccaccgaccacggcagaacctggtctagccctagagatctgaccgacgccgccatcggacctgcctatagagagtggtccaccttcgccgttggacctggacactgtctccagctgcacgacagggctagatctctggtggtgcctgcctacgcctatagaaagctgcaccccaaacagcggcctattcctagcgccttctgctttctgagccacgatcacggcaggacatgggccagaggacatttcgtggcccaggacacactggaatgccaggtggccgaagtggaaaccggcgagcagagagtcgtgaccctgaacgccagatctcacctgagattcagagtgcaggcccagagcacaaacgacggcctggatttccaagagagccagctggtcaagaaactggtggaacctcctccaaccggctgtcagggaagcgtgatcagctttccatctcctagaagcggccctggctctcctgctcagtggctgctgtatacacaccccacacacagctggcagagagccgatctgggcgcctacctgaatcctagacctcctgctcctgaggcttggagcgaacctgttctgctggccaagggcagcgctgcctacagcgatctgcagtctatgggcacaggccctgatggcagccctctgtttggctgtctgtacgaggccaacgactacgaagagatcgtgttcctgatgttcaccctgaagcaggcctttccagccgagtacctgcctcaa

SEQ ID NO: 182 - protein, 380 aa, Artificial Sequence
  Description of Artificial Sequence: Synthetic polypeptide
  MOD_RES (1)..(2): Any amino acid
  MOD_RES (4)..(6): Any amino acid
  MOD_RES (9)..(9): Any amino acid
  MOD_RES (44)..(45): Any amino acid
  MOD_RES (54)..(54): Any amino acid
  MOD_RES (62)..(62): Any amino acid
  MOD_RES (69)..(69): Any amino acid
  MOD_RES (78)..(78): Any amino acid
  MOD_RES (80)..(80): Any amino acid
  MOD_RES (93)..(93): Any amino acid
  MOD_RES (107)..(108): Any amino acid
  MOD_RES (112)..(112): Any amino acid
  MOD_RES (125)..(126): Any amino acid
  MOD_RES (150)..(150): Any amino acid
  MOD_RES (164)..(164): Any amino acid
  MOD_RES (170)..(171): Any amino acid
  MOD_RES (187)..(189): Any amino acid
  MOD_RES (196)..(196): Any amino acid
  MOD_RES (213)..(213): Any amino acid
  MOD_RES (217)..(217): Any amino acid
  MOD_RES (225)..(225): Any amino acid
  MOD_RES (239)..(242): Any amino acid
  MOD_RES (244)..(244): Any amino acid
  MOD_RES (249)..(249): Any amino acid
  MOD_RES (251)..(251): Any amino acid
  MOD_RES (257)..(258): Any amino acid
  MOD_RES (260)..(260): Any amino acid
  MOD_RES (265)..(265): Any amino acid
  MOD_RES (270)..(270): Any amino acid
  MOD_RES (272)..(272): Any amino acid
  MOD_RES (292)..(292): Any amino acid
  MOD_RES (301)..(302): Any amino acid
  MOD_RES (325)..(325): Any amino acid
  MOD_RES (332)..(332): Any amino acid
  MOD_RES (352)..(352): Any amino acid
  MOD_RES (363)..(363): Any amino acid
  MOD_RES (365)..(365): Any amino acid
XXSXXXLQXESVFQSGAHAYRIPALLYLPGQQSLLAFAEQRASXXDEHAELIVXRRGDYDAXTHQVQWXAQEVVAQAXLXGHRSMNPCPLYDXQTGTLFLFFIAIPXXVTEXQQLQTRANVTRLXXVTSTDHGRTWSSPRDLTDAAIGPXYREWSTFAVGPGHXLQLHDXXRSLVVPAYAYRKLHPXXXPIPSAFXFLSHDHGRTWARGHFVXQDTXECQVAEVXTGEQRVVTLNARSXXXXRXQAQSXNXGLDFQXXQXVKKLXEPPPXGXQGSVISFPSPRSGPGSPAQXLLYTHPTHXXQRADLGAYLNPRPPAPEAWSEPXLLAKGSXAYSDLQSMGTGPDGSPLFGXLYEANDYEEIXFXMFTLKQAFPAEYLPQ

SEQ ID NO: 183 - protein, 380 aa, Artificial Sequence
  Description of Artificial Sequence: Synthetic polypeptide
  MOD_RES (1)..(1): Any amino acid
  MOD_RES (6)..(6): Any amino acid
  MOD_RES (9)..(9): Any amino acid
  MOD_RES (62)..(62): Any amino acid
  MOD_RES (93)..(93): Any amino acid
  MOD_RES (126)..(126): Any amino acid
  MOD_RES (187)..(187): Any amino acid
  MOD_RES (242)..(242): Any amino acid
  MOD_RES (270)..(270): Any amino acid
  MOD_RES (301)..(302): Any amino acid
  MOD_RES (332)..(332): Any amino acid
  MOD_RES (363)..(363): Any amino acid
  MOD_RES (365)..(365): Any amino acid
XASLPXLQXESVFQSGAHAYRIPALLYLPGQQSLLAFAEQRASKKDEHAELIVLRRGDYDAXTHQVQWQAQEVVAQARLDGHRSMNPCPLYDXQTGTLFLFFIAIPGQVTEQQQLQTRANVTRLCXVTSTDHGRTWSSPRDLTDAAIGPAYREWSTFAVGPGHCLQLHDRARSLVVPAYAYRKLHPXQRPIPSAFCFLSHDHGRTWARGHFVAQDTLECQVAEVETGEQRVVTLNARSHLRXRVQAQSTNDGLDFQESQLVKKLVEPPPXGCQGSVISFPSPRSGPGSPAQWLLYTHPTHXXQRADLGAYLNPRPPAPEAWSEPVLLAKGSXAYSDLQSMGTGPDGSPLFGCLYEANDYEEIXFXMFTLKQAFPAEYLPQ

SEQ ID NO: 184 - protein, 5 aa, Artificial Sequence
  Description of Artificial Sequence: Synthetic peptide
GGGGS

SEQ ID NO: 185 - protein, 612 aa, Artificial Sequence
  Description of Artificial Sequence: Synthetic polypeptide
DASLPYLQKESVFQSGAHAYRIPALLYLPGQQSLLAFAEQRASKKDEHAELIVLRRGDYDAGTHQVQWQAQEVVAQARLDGHRSMNPCPLYDEQTGTLFLFFIAIPGQVTEQQQLQTRANVTRLCYVTSTDHGRTWSSPRDLTDAAIGPAYREWSTFAVGPGHCLQLHDRARSLVVPAYAYRKLHPKQRPIPSAFCFLSHDHGRTWARGHFVAQDTLECQVAEVETGEQRVVTLNARSHLRARVQAQSTNDGLDFQESQLVKKLVEPPPTGCQGSVISFPSPRSGPGSPAQWLLYTHPTHSWQRADLGAYLNPRPPAPEAWSEPVLLAKGSAAYSDLQSMGTGPDGSPLFGCLYEANDYEEIVFLMFTLKQAFPAEYLPQEPKSSDKTHTCPPCPAPELLGGPSVFLFPPKPKDTLMISRTPEVTCVVVDVSHEDPEVKFNWYVDGVEVHNAKTKPREEQYNSTYRVVSVLTVLHQDWLNGKEYKCKVSNKALPAPIEKTISKAKGQPREPQVYTLPPSREEMTKNQVSLYCLVKGFYPSDIAVEWESNGQPENNYKTTPPVLDSDGSFFLYSKLTVDKSRWQQGNVFSCSVMHEALHNHYTQKSLSLSPGK

SEQ ID NO: 186 - DNA, 1836 bp, Artificial Sequence
  Description of Artificial Sequence: Synthetic polynucleotide
gatgcatctctgccttacctgcagaaagaaagcgtgttccagtctggcgcccacgcctacagaattcccgctctgctgtatctgccaggccagcagtctctgctggctttcgctgaacagcgggccagcaagaaggatgagcacgccgaactgatcgtgctgcggagaggcgattacgacgccggcacacatcaggtgcagtggcaggctcaagaggtggtggctcaggctagactggacggccacagatctatgaacccctgtcctctgtacgatgaacagaccggcacactgtttctgttctttatcgctatccccggccaagtgaccgagcagcagcagctgcagacaagagccaacgtgaccagactgtgttacgtgacctccaccgaccacggcagaacctggtctagccctagagatctgaccgacgccgccatcggacctgcctatagagagtggtccaccttcgccgttggacctggacactgtctccagctgcacgacagggctagatctctggtggtgcctgcctacgcctatagaaagctgcaccccaaacagcggcctattcctagcgccttctgctttctgagccacgatcacggcaggacatgggccagaggacatttcgtggcccaggacacactggaatgccaggtggccgaagtggaaaccggcgagcagagagtcgtgaccctgaacgccagatctcacctgagagccagagtgcaggcccagagcacaaacgacggcctggatttccaagagagccagctggtcaagaaactggtggaacctcctccaaccggctgtcagggaagcgtgatcagctttccatctcctagaagcggccctggctctcctgctcagtggctgctgtatacacaccccacacacagctggcagagagccgatctgggcgcctacctgaatcctagacctcctgctcctgaggcttggagcgaacctgttctgctggccaagggcagcgctgcctacagcgatctgcagtctatgggcacaggccctgatggcagccctctgtttggctgtctgtacgaggccaacgactacgaagagatcgtgttcctgatgttcaccctgaagcaggcctttccagccgagtacctgcctcaagagcccaaatcttctgacaaaactcacacatgcccaccgtgcccagcacctgaactcctggggggaccgtcagtcttcctcttccccccaaaacccaaggacaccctcatgatctcccggacccctgaggtcacatgcgtggtggtggacgtgagccacgaagaccctgaggtcaagttcaactggtacgtggacggcgtggaggtgcataatgccaagacaaagccgcgggaggagcagtacaacagcacgtaccgtgtggtcagcgtcctcaccgtcctgcaccaggactggctgaatggcaaggagtacaagtgcaaggtctccaacaaagccctcccagcccccatcgagaaaaccatctccaaagccaaagggcagccccgagaaccacaggtctacaccctgcccccatcccgggaggagatgaccaagaaccaggtcagcctgtactgcctggtcaaaggcttctatcccagcgacatcgccgtggagtgggagagcaatgggcagccggagaacaactacaagaccacgcctcccgtgctggactccgacggctccttcttcctctatagcaagctcaccgtggacaagagcaggtggcagcaggggaacgtcttctcatgctccgtgatgcatgaggctctgcacaaccactacacgcagaagagcctctccctgtctccgggtaaa

SEQ ID NO: 187 - protein, 612 aa, Artificial Sequence
  Description of Artificial Sequence: Synthetic polypeptide
DASLPYLQKESVFQSGAHAYRIPALLYLPGQQSLLAFAEQRASKKDEHAELIVLRRGDYDAGTHQVQWQAQEVVAQARLDGHRSMNPCPLYDEQTGTLFLFFIAIPGQVTEQQQLQTRANVTRLCYVTSTDHGRTWSSPRDLTDAAIGPAYREWSTFAVGPGHCLQLHDRARSLVVPAYAYRKLHPKQRPIPSAFCFLSHDHGRTWARGHFVAQDTLECQVAEVETGEQRVVTLNARSHLRFRVQAQSTNDGLDFQESQLVKKLVEPPPTGCQGSVISFPSPRSGPGSPAQWLLYTHPTHSWQRADLGAYLNPRPPAPEAWSEPVLLAKGSAAYSDLQSMGTGPDGSPLFGCLYEANDYEEIVFLMFTLKQAFPAEYLPQEPKSSDKTHTCPPCPAPELLGGPSVFLFPPKPKDTLMISRTPEVTCVVVDVSHEDPEVKFNWYVDGVEVHNAKTKPREEQYNSTYRVVSVLTVLHQDWLNGKEYKCKVSNKALPAPIEKTISKAKGQPREPQVYTLPPSREEMTKNQVSLYCLVKGFYPSDIAVEWESNGQPENNYKTTPPVLDSDGSFFLYSKLTVDKSRWQQGNVFSCSVMHEALHNHYTQKSLSLSPGK

SEQ ID NO: 188 - DNA, 1836 bp, Artificial Sequence
  Description of Artificial Sequence: Synthetic polynucleotide
gatgcatctctgccttacctgcagaaagaaagcgtgttccagtctggcgcccacgcctacagaattcccgctctgctgtatctgccaggccagcagtctctgctggctttcgctgaacagcgggccagcaagaaggatgagcacgccgaactgatcgtgctgcggagaggcgattacgacgccggcacacatcaggtgcagtggcaggctcaagaggtggtggctcaggctagactggacggccacagatctatgaacccctgtcctctgtacgatgaacagaccggcacactgtttctgttctttatcgctatccccggccaagtgaccgagcagcagcagctgcagacaagagccaacgtgaccagactgtgttacgtgacctccaccgaccacggcagaacctggtctagccctagagatctgaccgacgccgccatcggacctgcctatagagagtggtccaccttcgccgttggacctggacactgtctccagctgcacgacagggctagatctctggtggtgcctgcctacgcctatagaaagctgcaccccaaacagcggcctattcctagcgccttctgctttctgagccacgatcacggcaggacatgggccagaggacatttcgtggcccaggacacactggaatgccaggtggccgaagtggaaaccggcgagcagagagtcgtgaccctgaacgccagatctcacctgagattcagagtgcaggcccagagcacaaacgacggcctggatttccaagagagccagctggtcaagaaactggtggaacctcctccaaccggctgtcagggaagcgtgatcagctttccatctcctagaagcggccctggctctcctgctcagtggctgctgtatacacaccccacacacagctggcagagagccgatctgggcgcctacctgaatcctagacctcctgctcctgaggcttggagcgaacctgttctgctggccaagggcagcgctgcctacagcgatctgcagtctatgggcacaggccctgatggcagccctctgtttggctgtctgtacgaggccaacgactacgaagagatcgtgttcctgatgttcaccctgaagcaggcctttccagccgagtacctgcctcaagagcccaaatcttctgacaaaactcacacatgcccaccgtgcccagcacctgaactcctggggggaccgtcagtcttcctcttccccccaaaacccaaggacaccctcatgatctcccggacccctgaggtcacatgcgtggtggtggacgtgagccacgaagaccctgaggtcaagttcaactggtacgtggacggcgtggaggtgcataatgccaagacaaagccgcgggaggagcagtacaacagcacgtaccgtgtggtcagcgtcctcaccgtcctgcaccaggactggctgaatggcaaggagtacaagtgcaaggtctccaacaaagccctcccagcccccatcgagaaaaccatctccaaagccaaagggcagccccgagaaccacaggtctacaccctgcccccatcccgggaggagatgaccaagaaccaggtcagcctgtactgcctggtcaaaggcttctatcccagcgacatcgccgtggagtgggagagcaatgggcagccggagaacaactacaagaccacgcctcccgtgctggactccgacggctccttcttcctctatagcaagctcaccgtggacaagagcaggtggcagcaggggaacgtcttctcatgctccgtgatgcatgaggctctgcacaaccactacacgcagaagagcctctccctgtctccgggtaaa

SEQ ID NO: 189 - protein, 450 aa, Artificial Sequence
  Description of Artificial Sequence: Synthetic polypeptide
EVQLVESGGGLVQPGGSLRLSCAASGFNIKDTYIHWVRQAPGKGLEWVARIYPTNGYTRYADSVKGRFTISADTSKNTAYLQMNSLRAEDTAVYYCSRWGGDGFYAMDYWGQGTLVTVSSASTKGPSVFPLAPSSKSTSGGTAALGCLVKDYFPEPVTVSWNSGALTSGVHTFPAVLQSSGLYSLSSVVTVPSSSLGTQTYICNVNHKPSNTKVDKKVEPKSCDKTHTCPPCPAPELLGGPSVFLFPPKPKDTLMISRTPEVTCVVVDVSHEDPEVKFNWYVDGVEVHNAKTKPREEQYNSTYRVVSVLTVLHQDWLNGKEYKCKVSNKALPAPIEKTISKAKGQPREPQVYTLPPSREEMTKNQVSLTCLVKGFYPSDIAVEWESNGQPENNYKTTPPVLDSDGSFFLTSKLTVDKSRWQQGNVFSCSVMHEALHNHYTQKSLSLSPGK

SEQ ID NO: 190 - DNA, 1350 bp, Artificial Sequence
  Description of Artificial Sequence: Synthetic polynucleotide
gaggtgcagctggttgaatctggcggaggactggttcagcctggcggatctctgagactgtcttgtgccgccagcggcttcaacatcaaggacacctacatccactgggtccgacaggcccctggcaaaggacttgaatgggtcgccagaatctaccccaccaacggctacaccagatacgccgactctgtgaagggcagattcaccatcagcgccgacaccagcaagaacaccgcctacctgcagatgaacagcctgagagccgaggacaccgccgtgtactactgttctagatggggaggcgacggcttctacgccatggattattggggccagggcaccctggtcaccgtttcttctgctagcaccaagggcccatccgtcttccccctggcaccctcctccaagagcacctctgggggcacagcggccctgggctgcctggtcaaggactacttccccgaaccggtgacggtgtcctggaactcaggcgctctgaccagcggcgtgcacaccttcccggctgtcctacagtcctcaggactctactccctcagcagcgtggtgaccgtgccctccagcagcttgggcacccagacctacatctgcaacgtgaatcacaagcccagcaacaccaaggtggacaagaaagttgagcccaaatcttgtgacaaaactcacacatgcccaccgtgcccagcacctgaactcctggggggaccgtcagtcttcctcttccccccaaaacccaaggacaccctcatgatctcccggacccctgaggtcacatgcgtggtggtggacgtgagccacgaagaccctgaggtcaagttcaactggtacgtggacggcgtggaggtgcataatgccaagacaaagccgcgggaggagcagtacaacagcacgtaccgtgtggtcagcgtcctcaccgtcctgcaccaggactggctgaatggcaaggagtacaagtgcaaggtctccaacaaagccctcccagcccccatcgagaaaaccatctccaaagccaaagggcagccccgagaaccacaggtctacaccctgcccccatcccgggaggagatgaccaagaaccaggtcagcctgacctgcctggtcaaaggcttctatcccagcgacatcgccgtggagtgggagagcaatgggcagccggagaacaactacaagaccacgcctcccgtgctggactccgacggctccttcttcctcactagcaagctcaccgtggacaagagcaggtggcagcaggggaacgtcttctcatgctccgtgatgcatgaggctctgcacaaccactacacgcagaagagcctctccctgtctccgggtaaa

SEQ ID NO: 191 - protein, 380 aa, Artificial Sequence
  Description of Artificial Sequence: Synthetic polypeptide
DASLPYLQKESVFQSGAHAYRIPALLYLPGQQSLLAFAEQRASKKDEHAELIVLRRGDYDAGTHQVQWQAQEVVAQARLDGHRSMNPCPLYDEQTGTLFLFFIAIPGQVTEQQQLQTRANVTRLCYVTSTDHGRTWSSPRDLTDAAIGPAYREWSTFAVGPGHCLQLHDRARSLVVPAYAYRKLHPKQRPIPSAFCFLSHDHGRTWARGHFVAQDTLECQVAEVETGEQRVVTLNARSHLRARVQAQSTNDGLDFQESQLVKKLVEPPPQGCQGSVISFPSPRSGPGSPAQWLLYTHPTHSWQRADLGAYLNPRPPAPEAWSEPVLLAKGSAAYSDLQSMGTGPDGSPLFGCLYEANDYEEIVFLMFTLKQAFPAEYLPQ

SEQ ID NO: 192 - protein, 612 aa, Artificial Sequence
  Description of Artificial Sequence: Synthetic polypeptide
DASLPYLQKESVFQSGAHAYRIPALLYLPGQQSLLAFAEQRASKKDEHAELIVLRRGDYDAGTHQVQWQAQEVVAQARLDGHRSMNPCPLYDEQTGTLFLFFIAIPGQVTEQQQLQTRANVTRLCYVTSTDHGRTWSSPRDLTDAAIGPAYREWSTFAVGPGHCLQLHDRARSLVVPAYAYRKLHPKQRPIPSAFCFLSHDHGRTWARGHFVAQDTLECQVAEVETGEQRVVTLNARSHLRARVQAQSTNDGLDFQESQLVKKLVEPPPQGCQGSVISFPSPRSGPGSPAQWLLYTHPTHSWQRADLGAYLNPRPPAPEAWSEPVLLAKGSAAYSDLQSMGTGPDGSPLFGCLYEANDYEEIVFLMFTLKQAFPAEYLPQEPKSSDKTHTCPPCPAPELLGGPSVFLFPPKPKDTLMISRTPEVTCVVVDVSHEDPEVKFNWYVDGVEVHNAKTKPREEQYNSTYRVVSVLTVLHQDWLNGKEYKCKVSNKALPAPIEKTISKAKGQPREPQVYTLPPSREEMTKNQVSLTCLVKGFYPSDIAVEWESNGQPENNYKTTPPVLDSDGSFFLTSKLTVDKSRWQQGNVFSCSVMHEALHNHYTQKSLSLSPGK

SEQ ID NO: 193 - protein, 612 aa, Artificial Sequence
  Description of Artificial Sequence: Synthetic polypeptide
DASLPYLQKESVFQSGAHAYRIPALLYLPGQQSLLAFAEQRASKKDEHAELIVLRRGDYDAGTHQVQWQAQEVVAQARLDGHRSMNPCPLYDEQTGTLFLFFIAIPGQVTEQQQLQTRANVTRLCYVTSTDHGRTWSSPRDLTDAAIGPAYREWSTFAVGPGHCLQLHDRARSLVVPAYAYRKLHPKQRPIPSAFCFLSHDHGRTWARGHFVAQDTLECQVAEVETGEQRVVTLNARSHLRARVQAQSTNDGLDFQESQLVKKLVEPPPQGCQGSVISFPSPRSGPGSPAQWLLYTHPTHSWQRADLGAYLNPRPPAPEAWSEPVLLAKGSAAYSDLQSMGTGPDGSPLFGCLYEANDYEEIVFLMFTLKQAFPAEYLPQEPKSSDKTHTCPPCPAPELLGGPSVFLFPPKPKDTLMISRTPEVTCVVVDVSHEDPEVKFNWYVDGVEVHNAKTKPREEQYNSTYRVVSVLTVLHQDWLNGKEYKCKVSNKALPAPIEKTISKAKGQPREPQVYTLPPSREEMTKNQVSLTCLVKGFYPSDIAVEWESNGQPENNYKTTPPVLDSDGSFFLYSKLTVDKSRWQQGNVFSCSVMHEALHNHYTQKSLSLSPGK

SEQ ID NO: 194 - protein, 869 aa, Artificial Sequence
  Description of Artificial Sequence: Synthetic polypeptide
DASLPYLQKESVFQSGAHAYRIPALLYLPGQQSLLAFAEQRASKKDEHAELIVLRRGDYDAGTHQVQWQAQEVVAQARLDGHRSMNPCPLYDEQTGTLFLFFIAIPGQVTEQQQLQTRANVTRLCYVTSTDHGRTWSSPRDLTDAAIGPAYREWSTFAVGPGHCLQLHDRARSLVVPAYAYRKLHPKQRPIPSAFCFLSHDHGRTWARGHFVAQDTLECQVAEVETGEQRVVTLNARSHLRARVQAQSTNDGLDFQESQLVKKLVEPPPQGCQGSVISFPSPRSGPGSPAQWLLYTHPTHSWQRADLGAYLNPRPPAPEAWSEPVLLAKGSAAYSDLQSMGTGPDGSPLFGCLYEANDYEEIVFLMFTLKQAFPAEYLPQEPKSSDKTHTCPPCPAPELLGGPSVFLFPPKPKDTLMISRTPEVTCVVVDVSHEDPEVKFNWYVDGVEVHNAKTKPREEQYNSTYRVVSVLTVLHQDWLNGKEYKCKVSNKALPAPIEKTISKAKGQPREPQVYTLPPSREEMTKNQVSLTCLVKGFYPSDIAVEWESNGQPENNYKTTPPVLDSDGSFFLYSKLTVDKSRWQQGNVFSCSVMHEALHNHYTQKSLSLSPGKGGGGSGGGGSGGGGSEVQLVESGGGLVQPGGSLRLSCAASGFNIKDTYIHWVRQAPGKGLEWVARIYPTNGYTRYADSVKGRFTISADTSKNTAYLQMNSLRAEDTAVYYCSRWGGDGFYAMDYWGQGTLVTVSSGGGGSGGGGSGGGGSDIQMTQSPSSLSASVGDRVTITCRASQDVNTAVAWYQQKPGKAPKLLIYSASFLYSGVPSRFSGSRSGTDFTLTISSLQPEDFATYYCQQHYTTPPTFGQGTKVEIK

SEQ ID NO: 195 - protein, 617 aa, Artificial Sequence
  Description of Artificial Sequence: Synthetic polypeptide
DASLPYLQKESVFQSGAHAYRIPALLYLPGQQSLLAFAEQRASKKDEHAELIVLRRGDYDAGTHQVQWQAQEVVAQARLDGHRSMNPCPLYDEQTGTLFLFFIAIPGQVTEQQQLQTRANVTRLCYVTSTDHGRTWSSPRDLTDAAIGPAYREWSTFAVGPGHCLQLHDRARSLVVPAYAYRKLHPKQRPIPSAFCFLSHDHGRTWARGHFVAQDTLECQVAEVETGEQRVVTLNARSHLRARVQAQSTNDGLDFQESQLVKKLVEPPPQGCQGSVISFPSPRSGPGSPAQWLLYTHPTHSWQRADLGAYLNPRPPAPEAWSEPVLLAKGSAAYSDLQSMGTGPDGSPLFGCLYEANDYEEIVFLMFTLKQAFPAEYLPQGGGGSGGGGSDKTHTCPPCPAPELLGGPSVFLFPPKPKDTLMISRTPEVTCVVVDVSHEDPEVKFNWYVDGVEVHNAKTKPREEQYNSTYRVVSVLTVLHQDWLNGKEYKCKVSNKALPAPIEKTISKAKGQPREPQVYTLPPSREEMTKNQVSLTCLVKGFYPSDIAVEWESNGQPENNYKTTPPVLDSDGSFFLTSKLTVDKSRWQQGNVFSCSVMHEALHNHYTQKSLSLSPGK

SEQ ID NO: 196 - protein, 617 aa, Artificial Sequence
  Description of Artificial Sequence: Synthetic polypeptide
DASLPYLQKESVFQSGAHAYRIPALLYLPGQQSLLAFAEQRASKKDEHAELIVLRRGDYDAGTHQVQWQAQEVVAQARLDGHRSMNPCPLYDEQTGTLFLFFIAIPGQVTEQQQLQTRANVTRLCYVTSTDHGRTWSSPRDLTDAAIGPAYREWSTFAVGPGHCLQLHDRARSLVVPAYAYRKLHPKQRPIPSAFCFLSHDHGRTWARGHFVAQDTLECQVAEVETGEQRVVTLNARSHLRARVQAQSTNDGLDFQESQLVKKLVEPPPQGCQGSVISFPSPRSGPGSPAQWLLYTHPTHSWQRADLGAYLNPRPPAPEAWSEPVLLAKGSAAYSDLQSMGTGPDGSPLFGCLYEANDYEEIVFLMFTLKQAFPAEYLPQGGGGSGGGGSDKTHTCPPCPAPELLGGPSVFLFPPKPKDTLMISRTPEVTCVVVDVSHEDPEVKFNWYVDGVEVHNAKTKPREEQYNSTYRVVSVLTVLHQDWLNGKEYKCKVSNKALPAPIEKTISKAKGQPREPQVYTLPPSREEMTKNQVSLTCLVKGFYPSDIAVEWESNGQPENNYKTTPPVLDSDGSFFLYSKLTVDKSRWQQGNVFSCSVMHEALHNHYTQKSLSLSPGK

SEQ ID NO: 197 - protein, 874 aa, Artificial Sequence
  Description of Artificial Sequence: Synthetic polypeptide
DASLPYLQKESVFQSGAHAYRIPALLYLPGQQSLLAFAEQRASKKDEHAELIVLRRGDYDAGTHQVQWQAQEVVAQARLDGHRSMNPCPLYDEQTGTLFLFFIAIPGQVTEQQQLQTRANVTRLCYVTSTDHGRTWSSPRDLTDAAIGPAYREWSTFAVGPGHCLQLHDRARSLVVPAYAYRKLHPKQRPIPSAFCFLSHDHGRTWARGHFVAQDTLECQVAEVETGEQRVVTLNARSHLRARVQAQSTNDGLDFQESQLVKKLVEPPPQGCQGSVISFPSPRSGPGSPAQWLLYTHPTHSWQRADLGAYLNPRPPAPEAWSEPVLLAKGSAAYSDLQSMGTGPDGSPLFGCLYEANDYEEIVFLMFTLKQAFPAEYLPQGGGGSGGGGSDKTHTCPPCPAPELLGGPSVFLFPPKPKDTLMISRTPEVTCVVVDVSHEDPEVKFNWYVDGVEVHNAKTKPREEQYNSTYRVVSVLTVLHQDWLNGKEYKCKVSNKALPAPIEKTISKAKGQPREPQVYTLPPSREEMTKNQVSLTCLVKGFYPSDIAVEWESNGQPENNYKTTPPVLDSDGSFFLYSKLTVDKSRWQQGNVFSCSVMHEALHNHYTQKSLSLSPGKGGGGSGGGGSGGGGSEVQLVESGGGLVQPGGSLRLSCAASGFNIKDTYIHWVRQAPGKGLEWVARIYPTNGYTRYADSVKGRFTISADTSKNTAYLQMNSLRAEDTAVYYCSRWGGDGFYAMDYWGQGTLVTVSSGGGGSGGGGSGGGGSDIQMTQSPSSLSASVGDRVTITCRASQDVNTAVAWYQQKPGKAPKLLIYSASFLYSGVPSRFSGSRSGTDFTLTISSLQPEDFATYYCQQHYTTPPTFGQGTKVEIK

SEQ ID NO: 198 - protein, 380 aa, Artificial Sequence
  Description of Artificial Sequence: Synthetic polypeptide
DASLPYLQKESVFQSGAHAYRIPALLYLPGQQSLLAFAEQRRSKKDEHAELIVLRRGDYDAGTHQVQWQAQEVVAQARLDGHRSMNPCPLYDEQTGTLFLFFIAIPGQVTEQQQLQTRANVTRLCYVTSTDHGRTWSSPRDLTDAAIGPAYREWSTFAVGPGHCLQLHDRARSLVVPAYAYRKLHPKQRPIPSAFCFLSHDHGRTWARGHFVAQDTLECQVAEVETGEQRVVTLNARSHLRFRVQAQSTNDGLDFQESQLVKKLVEPPPTGCQGSVISFPSPRSGPGSPAQWLLYTHPTHSWQRADLGAYLNPRPPAPEAWSEPVLLAKGSAAYSDLQSMGTGPDGSPLFGCLYEANDYEEIVFLMFTLKQAFPAEYLPQ

SEQ ID NO: 199 - protein, 380 aa, Artificial Sequence
  Description of Artificial Sequence: Synthetic polypeptide
  MOD_RES (1)..(1): Ala, Arg, Asn, Asp, Gln, Glu, Gly, His, Leu, Lys, Met, Phe, Thr, Val, or not present
  MOD_RES (2)..(2): Ala or Lys
  MOD_RES (4)..(4): Asn or Leu
  MOD_RES (5)..(5): Pro or His
  MOD_RES (6)..(6): Phe, Trp, Tyr or Val
  MOD_RES (9)..(9): Lys or Asp
  MOD_RES (42)..(42): Ala or Arg
  MOD_RES (44)..(44): Lys, Arg, or Glu
  MOD_RES (45)..(45): Lys, Ala, Arg, or Glu
  MOD_RES (54)..(54): Leu or Met
  MOD_RES (62)..(62): Pro, Asn, Asp, His, Glu, Gly, Ser or Thr
  MOD_RES (69)..(69): Gln or His
  MOD_RES (78)..(78): Arg or Lys
  MOD_RES (80)..(80): Asp or Pro
  MOD_RES (93)..(93): Ala, Glu or Lys
  MOD_RES (107)..(107): Gly or Asp
  MOD_RES (108)..(108): Gln or His
  MOD_RES (112)..(112): Gln, Arg, or Lys
  MOD_RES (125)..(125): Ala, Cys, Ile, Ser, Val, or Leu
  MOD_RES (126)..(126): Gln, Leu, Glu, Phe, His, Ile, Leu, or Tyr
  MOD_RES (150)..(150): Ala or Val
  MOD_RES (164)..(164): Cys or Gly
  MOD_RES (170)..(170): Arg or Pro
  MOD_RES (171)..(171): Ala or Gly
  MOD_RES (187)..(187): Arg, Ile, or Lys
  MOD_RES (188)..(188): Gln or Pro
  MOD_RES (189)..(189): Arg or Pro
  MOD_RES (196)..(196): Ala, Cys, Leu, or Val
  MOD_RES (213)..(213): Ala, Cys, Asn, Ser, or Thr
  MOD_RES (217)..(217): Leu, Ala, or Val
  MOD_RES (225)..(225): Glu or Pro
  MOD_RES (239)..(239): His or Pro
  MOD_RES (240)..(240): Leu, Asp, Asn, or Tyr
  MOD_RES (241)..(241): Arg, Ala, Asp, Leu, Gln, or Tyr
  MOD_RES (242)..(242): Ala, Cys, Phe, Gly, His, Ile, Lys, Leu, Met, Asn, Gln, Arg, Ser, Val, Trp, or Tyr
  MOD_RES (244)..(244): Val, Ile, or Lys
  MOD_RES (249)..(249): Thr or Ala
  MOD_RES (251)..(251): Asp or Gly
  MOD_RES (257)..(257): Glu, Lys, or Pro
  MOD_RES (258)..(258): Ser or Cys
  MOD_RES (260)..(260): Leu, Asp, Phe, Gln, or Thr
  MOD_RES (265)..(265): Val or Phe
  MOD_RES (270)..(270): Gln, Ala, His, Phe, Pro, Ser, or Thr
  MOD_RES (272)..(272): Cys or Val
  MOD_RES (292)..(292): Trp or Arg
  MOD_RES (301)..(301): Ser, Arg, Ala, Asp, Glu, Phe, Gly, His, Ile, Lys, Leu, Met, Asn, Pro, Gln, Thr, Val, Trp, or Tyr
  MOD_RES (302)..(302): Trp, Lys, Ala, Asp, Glu, Phe, Gly, His, Ile, Lys, Leu, Met, Asn, Pro, Gln, Arg, Ser, Thr, Val, or Tyr
  MOD_RES (325)..(325): Lys or Val
  MOD_RES (332)..(332): Ala, Cys, Ser, or Val
  MOD_RES (352)..(352): Cys, Leu, or Val
  MOD_RES (363)..(363): Val or Arg
  MOD_RES (365)..(365): Leu, Gln, His, Ile, Lys, or Ser
  See specification as filed for detailed description of substitutions and preferred embodiments
XXSXXXLQXESVFQSGAHAYRIPALLYLPGQQSLLAFAEQRXSXXDEHAELIVXRRGDYDAXTHQVQWXAQEVVAQAXLXGHRSMNPCPLYDXQTGTLFLFFIAIPXXVTEXQQLQTRANVTRLXXVTSTDHGRTWSSPRDLTDAAIGPXYREWSTFAVGPGHXLQLHDXXRSLVVPAYAYRKLHPXXXPIPSAFXFLSHDHGRTWARGHFVXQDTXECQVAEVXTGEQRVVTLNARSXXXXRXQAQSXNXGLDFQXXQXVKKLXEPPPXGXQGSVISFPSPRSGPGSPAQXLLYTHPTHXXQRADLGAYLNPRPPAPEAWSEPXLLAKGSXAYSDLQSMGTGPDGSPLFGXLYEANDYEEIXFXMFTLKQAFPAEYLPQ

SEQ ID NO: 200 - protein, 380 aa, Artificial Sequence
  Description of Artificial Sequence: Synthetic polypeptide
  MOD_RES (1)..(1): Ala, Arg, Asn, Asp, Gln, Glu, Gly, His, Leu, Lys, Met, Phe, Thr, Val, or not present
  MOD_RES (6)..(6): Phe, Trp, Tyr or Val
  MOD_RES (9)..(9): Lys or Asp
  MOD_RES (42)..(42): Arg or Ala
  MOD_RES (62)..(62): Pro, Asn, Asp, His, Glu, Gly, Ser or Thr
  MOD_RES (93)..(93): Ala, Glu, or Lys
  MOD_RES (126)..(126): Gln, Leu, Glu, Phe, His, Ile, Leu, or Tyr
  MOD_RES (187)..(187): Arg, Ile, or Lys
  MOD_RES (242)..(242): Ala, Cys, Phe, Gly, His, Ile, Lys, Leu, Met, Asn, Gln, Arg, Ser, Val, Trp, or Tyr
  MOD_RES (270)..(270): Gln, Ala, His, Phe, Pro, Ser, or Thr
  MOD_RES (301)..(301): Ser, Arg, Ala, Asp, Glu, Phe, Gly, His, Ile, Lys, Leu, Met, Asn, Pro, Gln, Thr, Val, Trp, or Tyr
  MOD_RES (302)..(302): Trp, Lys, Ala, Asp, Glu, Phe, Gly, His, Ile, Lys, Leu, Met, Asn, Pro, Gln, Arg, Ser, Thr, Val, or Tyr
  MOD_RES (332)..(332): Ala, Cys, Ser, or Val
  MOD_RES (363)..(363): Val or Arg
  MOD_RES (365)..(365): Leu, Gln, His, Ile, Lys, or Ser
  See specification as filed for detailed description of substitutions and preferred embodiments
XASLPXLQXESVFQSGAHAYRIPALLYLPGQQSLLAFAEQRXSKKDEHAELIVLRRGDYDAXTHQVQWQAQEVVAQARLDGHRSMNPCPLYDXQTGTLFLFFIAIPGQVTEQQQLQTRANVTRLCXVTSTDHGRTWSSPRDLTDAAIGPAYREWSTFAVGPGHCLQLHDRARSLVVPAYAYRKLHPXQRPIPSAFCFLSHDHGRTWARGHFVAQDTLECQVAEVETGEQRVVTLNARSHLRXRVQAQSTNDGLDFQESQLVKKLVEPPPXGCQGSVISFPSPRSGPGSPAQWLLYTHPTHXXQRADLGAYLNPRPPAPEAWSEPVLLAKGSXAYSDLQSMGTGPDGSPLFGCLYEANDYEEIXFXMFTLKQAFPAEYLPQ

SEQ ID NO: 201 - protein, 617 aa, Artificial Sequence
  Description of Artificial Sequence: Synthetic polypeptide
  MOD_RES (1)..(1): Ala, Arg, Asn, Asp, Gln, Glu, Gly, His, Leu, Lys, Met, Phe, Thr, Val, or not present
  MOD_RES (2)..(2): Ala or Lys
  MOD_RES (4)..(4): Asn or Leu
  MOD_RES (5)..(5): Pro or His
  MOD_RES (6)..(6): Phe, Trp, Tyr or Val
  MOD_RES (9)..(9): Lys or Asp
  MOD_RES (42)..(42): Ala or Arg
  MOD_RES (44)..(44): Lys, Arg, or Glu
  MOD_RES (45)..(45): Lys, Ala, Arg, or Glu
  MOD_RES (54)..(54): Leu or Met
  MOD_RES (62)..(62): Pro, Asn, Asp, His, Glu, Gly, Ser or Thr
  MOD_RES (69)..(69): Gln or His
  MOD_RES (78)..(78): Arg or Lys
  MOD_RES (80)..(80): Asp or Pro
  MOD_RES (93)..(93): Ala, Glu or Lys
  MOD_RES (107)..(107): Gly or Asp
  MOD_RES (108)..(108): Gln or His
  MOD_RES (112)..(112): Gln, Arg, or Lys
  MOD_RES (125)..(125): Ala, Cys, Ile, Ser, Val, or Leu
  MOD_RES (126)..(126): Gln, Leu, Glu, Phe, His, Ile, Leu, or Tyr
  MOD_RES (150)..(150): Ala or Val
  MOD_RES (164)..(164): Cys or Gly
  MOD_RES (170)..(170): Arg or Pro
  MOD_RES (171)..(171): Ala or Gly
  MOD_RES (187)..(187): Arg, Ile, or Lys
  MOD_RES (188)..(188): Gln or Pro
  MOD_RES (189)..(189): Arg or Pro
  MOD_RES (196)..(196): Ala, Cys, Leu, or Val
  MOD_RES (213)..(213): Ala, Cys, Asn, Ser, or Thr
  MOD_RES (217)..(217): Leu, Ala, or Val
  MOD_RES (225)..(225): Glu or Pro
  MOD_RES (239)..(239): His or Pro
  MOD_RES (240)..(240): Leu, Asp, Asn, or Tyr
  MOD_RES (241)..(241): Arg, Ala, Asp, Leu, Gln, or Tyr
  MOD_RES (242)..(242): Ala, Cys, Phe, Gly, His, Ile, Lys, Leu, Met, Asn, Gln, Arg, Ser, Val, Trp, or Tyr
  MOD_RES (244)..(244): Val, Ile, or Lys
  MOD_RES (249)..(249): Thr or Ala
  MOD_RES (251)..(251): Asp or Gly
  MOD_RES (257)..(257): Glu, Lys, or Pro
  MOD_RES (258)..(258): Ser or Cys
  MOD_RES (260)..(260): Leu, Asp, Phe, Gln, or Thr
  MOD_RES (265)..(265): Val or Phe
  MOD_RES (270)..(270): Gln, Ala, His, Phe, Pro, Ser, or Thr
  MOD_RES (272)..(272): Cys or Val
  MOD_RES (292)..(292): Trp or Arg
  MOD_RES (301)..(301): Ser, Arg, Ala, Asp, Glu, Phe, Gly, His, Ile, Lys, Leu, Met, Asn, Pro, Gln, Thr, Val, Trp, or Tyr
  MOD_RES (302)..(302): Trp, Lys, Ala, Asp, Glu, Phe, Gly, His, Ile, Lys, Leu, Met, Asn, Pro, Gln, Arg, Ser, Thr, Val, or Tyr
  MOD_RES (325)..(325): Lys or Val
  MOD_RES (332)..(332): Ala, Cys, Ser, or Val
  MOD_RES (352)..(352): Cys, Leu, or Val
  MOD_RES (363)..(363): Val or Arg
  MOD_RES (365)..(365): Leu, Gln, His, Ile, Lys, or Ser
  MOD_RES (381)..(390): This region may encompass one of the following sequences: "GGGGS" or "GGGGSGGGGS" or "EPKSS"
  See specification as filed for detailed description of substitutions and preferred embodiments
XXSXXXLQXESVFQSGAHAYRIPALLYLPGQQSLLAFAEQRXSXXDEHAELIVXRRGDYDAXTHQVQWXAQEVVAQAXLXGHRSMNPCPLYDXQTGTLFLFFIAIPXXVTEXQQLQTRANVTRLXXVTSTDHGRTWSSPRDLTDAAIGPXYREWSTFAVGPGHXLQLHDXXRSLVVPAYAYRKLHPXXXPIPSAFXFLSHDHGRTWARGHFVXQDTXECQVAEVXTGEQRVVTLNARSXXXXRXQAQSXNXGLDFQXXQXVKKLXEPPPXGXQGSVISFPSPRSGPGSPAQXLLYTHPTHXXQRADLGAYLNPRPPAPEAWSEPXLLAKGSXAYSDLQSMGTGPDGSPLFGXLYEANDYEEIXFXMFTLKQAFPAEYLPQXXXXXXXXXXDKTHTCPPCPAPELLGGPSVFLFPPKPKDTLMISRTPEVTCVVVDVSHEDPEVKFNWYVDGVEVHNAKTKPREEQYNSTYRVVSVLTVLHQDWLNGKEYKCKVSNKALPAPIEKTISKAKGQPREPQVYTLPPSREEMTKNQVSLTCLVKGFYPSDIAVEWESNGQPENNYKTTPPVLDSDGSFFLTSKLTVDKSRWQQGNVFSCSVMHEALHNHYTQKSLSLSPGK

SEQ ID NO: 202 - protein, 617 aa, Artificial Sequence
  Description of Artificial Sequence: Synthetic polypeptide
  MOD_RES (1)..(1): Ala, Arg, Asn, Asp, Gln, Glu, Gly, His, Leu, Lys, Met, Phe, Thr, Val, or not present
  MOD_RES (6)..(6): Phe, Trp, Tyr or Val
  MOD_RES (9)..(9): Lys or Asp
  MOD_RES (42)..(42): Arg or Ala
  MOD_RES (62)..(62): Pro, Asn, Asp, His, Glu, Gly, Ser or Thr
  MOD_RES (93)..(93): Ala, Glu, or Lys
  MOD_RES (126)..(126): Gln, Leu, Glu, Phe, His, Ile, Leu, or Tyr
  MOD_RES (187)..(187): Arg, Ile, or Lys
  MOD_RES (242)..(242): Ala, Cys, Phe, Gly, His, Ile, Lys, Leu, Met, Asn, Gln, Arg, Ser, Val, Trp, or Tyr
  MOD_RES (270)..(270): Gln, Ala, His, Phe, Pro, Ser, or Thr
  MOD_RES (301)..(301): Ser, Arg, Ala, Asp, Glu, Phe, Gly, His, Ile, Lys, Leu, Met, Asn, Pro, Gln, Thr, Val, Trp, or Tyr
  MOD_RES (302)..(302): Trp, Lys, Ala, Asp, Glu, Phe, Gly, His, Ile, Lys, Leu, Met, Asn, Pro, Gln, Arg, Ser, Thr, Val, or Tyr
  MOD_RES (332)..(332): Ala, Cys, Ser, or Val
  MOD_RES (363)..(363): Val or Arg
  MOD_RES (365)..(365): Leu, Gln, His, Ile, Lys, or Ser
  MOD_RES (381)..(390): This region may encompass one of the following sequences: "GGGGS" or "GGGGSGGGGS" or "EPKSS"
  See specification as filed for detailed description of substitutions and preferred embodiments
XASLPXLQXESVFQSGAHAYRIPALLYLPGQQSLLAFAEQRXSKKDEHAELIVLRRGDYDAXTHQVQWQAQEVVAQARLDGHRSMNPCPLYDXQTGTLFLFFIAIPGQVTEQQQLQTRANVTRLCXVTSTDHGRTWSSPRDLTDAAIGPAYREWSTFAVGPGHCLQLHDRARSLVVPAYAYRKLHPXQRPIPSAFCFLSHDHGRTWARGHFVAQDTLECQVAEVETGEQRVVTLNARSHLRXRVQAQSTNDGLDFQESQLVKKLVEPPPXGCQGSVISFPSPRSGPGSPAQWLLYTHPTHXXQRADLGAYLNPRPPAPEAWSEPVLLAKGSXAYSDLQSMGTGPDGSPLFGCLYEANDYEEIXFXMFTLKQAFPAEYLPQXXXXXXXXXXDKTHTCPPCPAPELLGGPSVFLFPPKPKDTLMISRTPEVTCVVVDVSHEDPEVKFNWYVDGVEVHNAKTKPREEQYNSTYRVVSVLTVLHQDWLNGKEYKCKVSNKALPAPIEKTISKAKGQPREPQVYTLPPSREEMTKNQVSLTCLVKGFYPSDIAVEWESNGQPENNYKTTPPVLDSDGSFFLTSKLTVDKSRWQQGNVFSCSVMHEALHNHYTQKSLSLSPGK

SEQ ID NO: 203 - protein, 612 aa, Artificial Sequence
  Description of Artificial Sequence: Synthetic polypeptide
DASLPYLQKESVFQSGAHAYRIPALLYLPGQQSLLAFAEQRRSKKDEHAELIVLRRGDYDAGTHQVQWQAQEVVAQARLDGHRSMNPCPLYDEQTGTLFLFFIAIPGQVTEQQQLQTRANVTRLCYVTSTDHGRTWSSPRDLTDAAIGPAYREWSTFAVGPGHCLQLHDRARSLVVPAYAYRKLHPKQRPIPSAFCFLSHDHGRTWARGHFVAQDTLECQVAEVETGEQRVVTLNARSHLRFRVQAQSTNDGLDFQESQLVKKLVEPPPTGCQGSVISFPSPRSGPGSPAQWLLYTHPTHSWQRADLGAYLNPRPPAPEAWSEPVLLAKGSAAYSDLQSMGTGPDGSPLFGCLYEANDYEEIVFLMFTLKQAFPAEYLPQEPKSSDKTHTCPPCPAPELLGGPSVFLFPPKPKDTLMISRTPEVTCVVVDVSHEDPEVKFNWYVDGVEVHNAKTKPREEQYASTYRVVSVLTVLHQDWLNGKEYKCKVSNKALPAPIEKTISKAKGQPREPQVYTLPPSREEMTKNQVSLYCLVKGFYPSDIAVEWESNGQPENNYKTTPPVLDSDGSFFLYSKLTVDKSRWQQGNVFSCSVMHEALHNHYTQKSLSLSPGK

SEQ ID NO: 204 - protein, 617 aa, Artificial Sequence
  Description of Artificial Sequence: Synthetic polypeptide
DASLPYLQKESVFQSGAHAYRIPALLYLPGQQSLLAFAEQRRSKKDEHAELIVLRRGDYDAGTHQVQWQAQEVVAQARLDGHRSMNPCPLYDEQTGTLFLFFIAIPGQVTEQQQLQTRANVTRLCYVTSTDHGRTWSSPRDLTDAAIGPAYREWSTFAVGPGHCLQLHDRARSLVVPAYAYRKLHPKQRPIPSAFCFLSHDHGRTWARGHFVAQDTLECQVAEVETGEQRVVTLNARSHLRFRVQAQSTNDGLDFQESQLVKKLVEPPPTGCQGSVISFPSPRSGPGSPAQWLLYTHPTHSWQRADLGAYLNPRPPAPEAWSEPVLLAKGSAAYSDLQSMGTGPDGSPLFGCLYEANDYEEIVFLMFTLKQAFPAEYLPQGGGGSGGGGSDKTHTCPPCPAPELLGGPSVFLFPPKPKDTLMISRTPEVTCVVVDVSHEDPEVKFNWYVDGVEVHNAKTKPREEQYASTYRVVSVLTVLHQDWLNGKEYKCKVSNKALPAPIEKTISKAKGQPREPQVYTLPPSREEMTKNQVSLYCLVKGFYPSDIAVEWESNGQPENNYKTTPPVLDSDGSFFLYSKLTVDKSRWQQGNVFSCSVMHEALHNHYTQKSLSLSPGK

SEQ ID NO: 205 - protein, 612 aa, Artificial Sequence
  Description of Artificial Sequence: Synthetic polypeptide
DASLPYLQKESVFQSGAHAYRIPALLYLPGQQSLLAFAEQRRSKKDEHAELIVLRRGDYDAGTHQVQWQAQEVVAQARLDGHRSMNPCPLYDEQTGTLFLFFIAIPGQVTEQQQLQTRANVTRLCYVTSTDHGRTWSSPRDLTDAAIGPAYREWSTFAVGPGHCLQLHDRARSLVVPAYAYRKLHPKQRPIPSAFCFLSHDHGRTWARGHFVAQDTLECQVAEVETGEQRVVTLNARSHLRFRVQAQSTNDGLDFQESQLVKKLVEPPPTGCQGSVISFPSPRSGPGSPAQWLLYTHPTHSWQRADLGAYLNPRPPAPEAWSEPVLLAKGSAAYSDLQSMGTGPDGSPLFGCLYEANDYEEIVFLMFTLKQAFPAEYLPQEPKSSDKTHTCPPCPAPELLGGPSVFLFPPKPKDTLMISRTPEVTCVVVDVSHEDPEVKFNWYVDGVEVHNAKTKPREEQYNSTYRVVSVLTVLHQDWLNGKEYKCKVSNKALPAPIEKTISKAKGQPREPQVYTLPPSREEMTKNQVSLYCLVKGFYPSDIAVEWESNGQPENNYKTTPPVLDSDGSFFLYSKLTVDKSRWQQGNVFSCSVMHEALHNHYTQKSLSLSPGK

SEQ ID NO: 206 - protein, 617 aa, Artificial Sequence
  Description of Artificial Sequence: Synthetic polypeptide
DASLPYLQKESVFQSGAHAYRIPALLYLPGQQSLLAFAEQRRSKKDEHAELIVLRRGDYDAGTHQVQWQAQEVVAQARLDGHRSMNPCPLYDEQTGTLFLFFIAIPGQVTEQQQLQTRANVTRLCYVTSTDHGRTWSSPRDLTDAAIGPAYREWSTFAVGPGHCLQLHDRARSLVVPAYAYRKLHPKQRPIPSAFCFLSHDHGRTWARGHFVAQDTLECQVAEVETGEQRVVTLNARSHLRFRVQAQSTNDGLDFQESQLVKKLVEPPPTGCQGSVISFPSPRSGPGSPAQWLLYTHPTHSWQRADLGAYLNPRPPAPEAWSEPVLLAKGSAAYSDLQSMGTGPDGSPLFGCLYEANDYEEIVFLMFTLKQAFPAEYLPQGGGGSGGGGSDKTHTCPPCPAPELLGGPSVFLFPPKPKDTLMISRTPEVTCVVVDVSHEDPEVKFNWYVDGVEVHNAKTKPREEQYNSTYRVVSVLTVLHQDWLNGKEYKCKVSNKALPAPIEKTISKAKGQPREPQVYTLPPSREEMTKNQVSLYCLVKGFYPSDIAVEWESNGQPENNYKTTPPVLDSDGSFFLYSKLTVDKSRWQQGNVFSCSVMHEALHNHYTQKSLSLSPGK

SEQ ID NO: 207 - protein, 617 aa, Artificial Sequence
  Description of Artificial Sequence: Synthetic polypeptide
DASLPYLQKESVFQSGAHAYRIPALLYLPGQQSLLAFAEQRRSKKDEHAELIVLRRGDYDAGTHQVQWQAQEVVAQARLDGHRSMNPCPLYDEQTGTLFLFFIAIPGQVTEQQQLQTRANVTRLCYVTSTDHGRTWSSPRDLTDAAIGPAYREWSTFAVGPGHCLQLHDRARSLVVPAYAYRKLHPKQRPIPSAFCFLSHDHGRTWARGHFVAQDTLECQVAEVETGEQRVVTLNARSHLRFRVQAQSTNDGLDFQESQLVKKLVEPPPTGCQGSVISFPSPRSGPGSPAQWLLYTHPTHSWQRADLGAYLNPRPPAPEAWSEPVLLAKGSAAYSDLQSMGTGPDGSPLFGCLYEANDYEEIVFLMFTLKQAFPAEYLPQGGGGSGGGGSDKTHTCPPCPAPELLGGPSVFLFPPKPKDTLMISRTPEVTCVVVDVSHEDPEVKFNWYVDGVEVHNAKTKPREEQYNSTYRVVSVLTVLHQDWLNGKEYKCKVSNKALPAPIEKTISKAKGQPREPQVYTLPPSREEMTKNQVSLTCLVKGFYPSDIAVEWESNGQPENNYKTTPPVLDSDGSFFLTSKLTVDKSRWQQGNVFSCSVMHEALHNHYTQKSLSLSPGK

SEQ ID NO: 208 - protein, 612 aa, Artificial Sequence
  Description of Artificial Sequence: Synthetic polypeptide
DASLPYLQKESVFQSGAHAYRIPALLYLPGQQSLLAFAEQRRSKKDEHAELIVLRRGDYDAGTHQVQWQAQEVVAQARLDGHRSMNPCPLYDEQTGTLFLFFIAIPGQVTEQQQLQTRANVTRLCYVTSTDHGRTWSSPRDLTDAAIGPAYREWSTFAVGPGHCLQLHDRARSLVVPAYAYRKLHPKQRPIPSAFCFLSHDHGRTWARGHFVAQDTLECQVAEVETGEQRVVTLNARSHLRFRVQAQSTNDGLDFQESQLVKKLVEPPPTGCQGSVISFPSPRSGPGSPAQWLLYTHPTHSWQRADLGAYLNPRPPAPEAWSEPVLLAKGSAAYSDLQSMGTGPDGSPLFGCLYEANDYEEIVFLMFTLKQAFPAEYLPQEPKSSDKTHTCPPCPAPELLGGPSVFLFPPKPKDTLMISRTPEVTCVVVDVSHEDPEVKFNWYVDGVEVHNAKTKPREEQYNSTYRVVSVLTVLHQDWLNGKEYKCKVSNKALPAPIEKTISKAKGQPREPQVYTLPPSREEMTKNQVSLTCLVKGFYPSDIAVEWESNGQPENNYKTTPPVLDSDGSFFLTSKLTVDKSRWQQGNVFSCSVMHEALHNHYTQKSLSLSPGK

SEQ ID NO: 209 - protein, 617 aa, Artificial Sequence
  Description of Artificial Sequence: Synthetic polypeptide
DASLPYLQKESVFQSGAHAYRIPALLYLPGQQSLLAFAEQRRSKKDEHAELIVLRRGDYDAGTHQVQWQAQEVVAQARLDGHRSMNPCPLYDEQTGTLFLFFIAIPGQVTEQQQLQTRANVTRLCYVTSTDHGRTWSSPRDLTDAAIGPAYREWSTFAVGPGHCLQLHDRARSLVVPAYAYRKLHPKQRPIPSAFCFLSHDHGRTWARGHFVAQDTLECQVAEVETGEQRVVTLNARSHLRFRVQAQSTNDGLDFQESQLVKKLVEPPPTGCQGSVISFPSPRSGPGSPAQWLLYTHPTHSWQRADLGAYLNPRPPAPEAWSEPVLLAKGSAAYSDLQSMGTGPDGSPLFGCLYEANDYEEIVFLMFTLKQAFPAEYLPQGGGGSGGGGSDKTHTCPPCPAPELLGGPSVFLFPPKPKDTLMISRTPEVTCVVVDVSHEDPEVKFNWYVDGVEVHNAKTKPREEQYNSTYRVVSVLTVLHQDWLNGKEYKCKVSNKALPAPIEKTISKAKGQPREPQVYTLPPSREEMTKNQVSLTCLVKGFYPSDIAVEWESNGQPENNYKTTPPVLDSDGSFFLYSKLTVDKSRWQQGNVFSCSVMHEALHNHYTQKSLSLSPGK

SEQ ID NO: 210 - protein, 612 aa, Artificial Sequence
  Description of Artificial Sequence: Synthetic polypeptide
DASLPYLQKESVFQSGAHAYRIPALLYLPGQQSLLAFAEQRRSKKDEHAELIVLRRGDYDAGTHQVQWQAQEVVAQARLDGHRSMNPCPLYDEQTGTLFLFFIAIPGQVTEQQQLQTRANVTRLCYVTSTDHGRTWSSPRDLTDAAIGPAYREWSTFAVGPGHCLQLHDRARSLVVPAYAYRKLHPKQRPIPSAFCFLSHDHGRTWARGHFVAQDTLECQVAEVETGEQRVVTLNARSHLRFRVQAQSTNDGLDFQESQLVKKLVEPPPTGCQGSVISFPSPRSGPGSPAQWLLYTHPTHSWQRADLGAYLNPRPPAPEAWSEPVLLAKGSAAYSDLQSMGTGPDGSPLFGCLYEANDYEEIVFLMFTLKQAFPAEYLPQEPKSSDKTHTCPPCPAPELLGGPSVFLFPPKPKDTLMISRTPEVTCVVVDVSHEDPEVKFNWYVDGVEVHNAKTKPREEQYNSTYRVVSVLTVLHQDWLNGKEYKCKVSNKALPAPIEKTISKAKGQPREPQVYTLPPSREEMTKNQVSLTCLVKGFYPSDIAVEWESNGQPENNYKTTPPVLDSDGSFFLYSKLTVDKSRWQQGNVFSCSVMHEALHNHYTQKSLSLSPGK

SEQ ID NO: 211 - protein, 330 aa, Artificial Sequence
  Description of Artificial Sequence: Synthetic polypeptide
ASTKGPSVFPLAPSSKSTSGGTAALGCLVKDYFPEPVTVSWNSGALTSGVHTFPAVLQSSGLYSLSSVVTVPSSSLGTQTYICNVNHKPSNTKVDKKVEPKSCDKTHTCPPCPAPELLGGPSVFLFPPKPKDTLMISRTPEVTCVVVDVSHEDPEVKFNWYVDGVEVHNAKTKPREEQYNSTYRVVSVLTVLHQDWLNGKEYKCKVSNKALPAPIEKTISKAKGQPREPQVYTLPPSREEMTKNQVSLTCLVKGFYPSDIAVEWESNGQPENNYKTTPPVLDSDGSFFLYSKLTVDKSRWQQGNVFSCSVMHEALHNHYTQKSLSLSPGK

SEQ ID NO: 212 - protein, 330 aa, Artificial Sequence
  Description of Artificial Sequence: Synthetic polypeptide
ASTKGPSVFPLAPSSKSTSGGTAALGCLVKDYFPEPVTVSWNSGALTSGVHTFPAVLQSSGLYSLSSVVTVPSSSLGTQTYICNVNHKPSNTKVDKKVEPKSCDKTHTCPPCPAPELLGGPSVFLFPPKPKDTLMISRTPEVTCVVVDVSHEDPEVKFNWYVDGVEVHNAKTKPREEQYASTYRVVSVLTVLHQDWLNGKEYKCKVSNKALPAPIEKTISKAKGQPREPQVYTLPPSREEMTKNQVSLTCLVKGFYPSDIAVEWESNGQPENNYKTTPPVLDSDGSFFLYSKLTVDKSRWQQGNVFSCSVMHEALHNHYTQKSLSLSPGK

SEQ ID NO: 213 - protein, 330 aa, Artificial Sequence
  Description of Artificial Sequence: Synthetic polypeptide
ASTKGPSVFPLAPSSKSTSGGTAALGCLVKDYFPEPVTVSWNSGALTSGVHTFPAVLQSSGLYSLSSVVTVPSSSLGTQTYICNVNHKPSNTKVDKKVEPKSCDKTHTCPPCPAPELLGGPSVFLFPPKPKDTLMISRTPEVTCVVVDVSHEDPEVKFNWYVDGVEVHNAKTKPREEQYNSTYRVVSVLTVLHQDWLNGKEYKCKVSNKALPAPIEKTISKAKGQPREPQVYTLPPSREEMTKNQVSLTCLVKGFYPSDIAVEWESNGQPENNYKTTPPVLDSDGSFFLTSKLTVDKSRWQQGNVFSCSVMHEALHNHYTQKSLSLSPGK

SEQ ID NO: 214 - protein, 330 aa, Artificial Sequence
  Description of Artificial Sequence: Synthetic polypeptide
ASTKGPSVFPLAPSSKSTSGGTAALGCLVKDYFPEPVTVSWNSGALTSGVHTFPAVLQSSGLYSLSSVVTVPSSSLGTQTYICNVNHKPSNTKVDKKVEPKSCDKTHTCPPCPAPELLGGPSVFLFPPKPKDTLMISRTPEVTCVVVDVSHEDPEVKFNWYVDGVEVHNAKTKPREEQYNSTYRVVSVLTVLHQDWLNGKEYKCKVSNKALPAPIEKTISKAKGQPREPQVYTLPPSREEMTKNQVSLYCLVKGFYPSDIAVEWESNGQPENNYKTTPPVLDSDGSFFLYSKLTVDKSRWQQGNVFSCSVMHEALHNHYTQKSLSLSPGK

SEQ ID NO: 215 - protein, 330 aa, Artificial Sequence
  Description of Artificial Sequence: Synthetic polypeptide
ASTKGPSVFPLAPSSKSTSGGTAALGCLVKDYFPEPVTVSWNSGALTSGVHTFPAVLQSSGLYSLSSVVTVPSSSLGTQTYICNVNHKPSNTKVDKKVEPKSCDKTHTCPPCPAPELLGGPSVFLFPPKPKDTLMISRTPEVTCVVVDVSHEDPEVKFNWYVDGVEVHNAKTKPREEQYASTYRVVSVLTVLHQDWLNGKEYKCKVSNKALPAPIEKTISKAKGQPREPQVYTLPPSREEMTKNQVSLTCLVKGFYPSDIAVEWESNGQPENNYKTTPPVLDSDGSFFLTSKLTVDKSRWQQGNVFSCSVMHEALHNHYTQKSLSLSPGK

SEQ ID NO: 216 - protein, 330 aa, Artificial Sequence
  Description of Artificial Sequence: Synthetic polypeptide
ASTKGPSVFPLAPSSKSTSGGTAALGCLVKDYFPEPVTVSWNSGALTSGVHTFPAVLQSSGLYSLSSVVTVPSSSLGTQTYICNVNHKPSNTKVDKKVEPKSCDKTHTCPPCPAPELLGGPSVFLFPPKPKDTLMISRTPEVTCVVVDVSHEDPEVKFNWYVDGVEVHNAKTKPREEQYASTYRVVSVLTVLHQDWLNGKEYKCKVSNKALPAPIEKTISKAKGQPREPQVYTLPPSREEMTKNQVSLYCLVKGFYPSDIAVEWESNGQPENNYKTTPPVLDSDGSFFLYSKLTVDKSRWQQGNVFSCSVMHEALHNHYTQKSLSLSPGK

SEQ ID NO: 217 - DNA, 1836 bp, Artificial Sequence
  Description of Artificial Sequence: Synthetic polynucleotide
gatgcatctctgccttacctgcagaaagaaagcgtgttccagtctggcgcccacgcctacagaattcccgctctgctgtatctgccaggccagcagtctctgctggctttcgctgaacagcggcggagcaagaaggatgagcacgccgaactgatcgtgctgcggagaggcgattacgacgccggcacacatcaggtgcagtggcaggctcaagaggtggtggctcaggctagactggacggccacagatctatgaacccctgtcctctgtacgatgaacagaccggcacactgtttctgttctttatcgctatccccggccaagtgaccgagcagcagcagctgcagacaagagccaacgtgaccagactgtgttacgtgacctccaccgaccacggcagaacctggtctagccctagagatctgaccgacgccgccatcggacctgcctatagagagtggtccaccttcgccgttggacctggacactgtctccagctgcacgacagggctagatctctggtggtgcctgcctacgcctatagaaagctgcaccccaaacagcggcctattcctagcgccttctgctttctgagccacgatcacggcaggacatgggccagaggacatttcgtggcccaggacacactggaatgccaggtggccgaagtggaaaccggcgagcagagagtcgtgaccctgaacgccagatctcacctgagattcagagtgcaggcccagagcacaaacgacggcctggatttccaagagagccagctggtcaagaaactggtggaacctcctccaaccggctgtcagggaagcgtgatcagctttccatctcctagaagcggccctggctctcctgctcagtggctgctgtatacacaccccacacacagctggcagagagccgatctgggcgcctacctgaatcctagacctcctgctcctgaggcttggagcgaacctgttctgctggccaagggcagcgctgcctacagcgatctgcagtctatgggcacaggccctgatggcagccctctgtttggctgtctgtacgaggccaacgactacgaagagatcgtgttcctgatgttcaccctgaagcaggcctttccagccgagtacctgcctcaagagcccaaatcttctgacaaaactcacacatgcccaccgtgcccagcacctgaactcctggggggaccgtcagtcttcctcttccccccaaaacccaaggacaccctcatgatctcccggacccctgaggtcacatgcgtggtggtggacgtgagccacgaagaccctgaggtcaagttcaactggtacgtggacggcgtggaggtgcataatgccaagacaaagccgcgggaggagcagtacaacagcacgtaccgtgtggtcagcgtcctcaccgtcctgcaccaggactggctgaatggcaaggagtacaagtgcaaggtctccaacaaagccctcccagcccccatcgagaaaaccatctccaaagccaaagggcagccccgagaaccacaggtctacaccctgcccccatcccgggaggagatgaccaagaaccaggtcagcctgacctgcctggtcaaaggcttctatcccagcgacatcgccgtggagtgggagagcaatgggcagccggagaacaactacaagaccacgcctcccgtgctggactccgacggctccttcttcctctatagcaagctcaccgtggacaagagcaggtggcagcaggggaacgtcttctcatgctccgtgatgcatgaggctctgcacaaccactacacgcagaagagcctctccctgtctccgggtaaa

SEQ ID NO: 218 - protein, 612 aa, Artificial Sequence
  Description of Artificial Sequence: Synthetic polypeptide
DASLPYLQKESVFQSGAHAYRIPALLYLPGQQSLLAFAEQRRSKKDEHAELIVLRRGDYDAGTHQVQWQAQEVVAQARLDGHRSMNPCPLYDEQTGTLFLFFIAIPGQVTEQQQLQTRANVTRLCYVTSTDHGRTWSSPRDLTDAAIGPAYREWSTFAVGPGHCLQLHDRARSLVVPAYAYRKLHPKQRPIPSAFCFLSHDHGRTWARGHFVAQDTLECQVAEVETGEQRVVTLNARSHLRFRVQAQSTNDGLDFQESQLVKKLVEPPPTGCQGSVISFPSPRSGPGSPAQWLLYTHPTHSWQRADLGAYLNPRPPAPEAWSEPVLLAKGSAAYSDLQSMGTGPDGSPLFGCLYEANDYEEIVFLMFTLKQAFPAEYLPQEPKSSDKTHTCPPCPAPELLGGPSVFLFPPKPKDTLMISRTPEVTCVVVDVSHEDPEVKFNWYVDGVEVHNAKTKPREEQYASTYRVVSVLTVLHQDWLNGKEYKCKVSNKALPAPIEKTISKAKGQPREPQVYTLPPSREEMTKNQVSLTCLVKGFYPSDIAVEWESNGQPENNYKTTPPVLDSDGSFFLYSKLTVDKSRWQQGNVFSCSVMHEALHNHYTQKSLSLSPGK

SEQ ID NO: 219 - DNA, 1836 bp, Artificial Sequence
  Description of Artificial Sequence: Synthetic polynucleotide
gatgcatctctgccttacctgcagaaagaaagcgtgttccagtctggcgcccacgcctacagaattcccgctctgctgtatctgccaggccagcagtctctgctggctttcgctgaacagcggcggagcaagaaggatgagcacgccgaactgatcgtgctgcggagaggcgattacgacgccggcacacatcaggtgcagtggcaggctcaagaggtggtggctcaggctagactggacggccacagatctatgaacccctgtcctctgtacgatgaacagaccggcacactgtttctgttctttatcgctatccccggccaagtgaccgagcagcagcagctgcagacaagagccaacgtgaccagactgtgttacgtgacctccaccgaccacggcagaacctggtctagccctagagatctgaccgacgccgccatcggacctgcctatagagagtggtccaccttcgccgttggacctggacactgtctccagctgcacgacagggctagatctctggtggtgcctgcctacgcctatagaaagctgcaccccaaacagcggcctattcctagcgccttctgctttctgagccacgatcacggcaggacatgggccagaggacatttcgtggcccaggacacactggaatgccaggtggccgaagtggaaaccggcgagcagagagtcgtgaccctgaacgccagatctcacctgagattcagagtgcaggcccagagcacaaacgacggcctggatttccaagagagccagctggtcaagaaactggtggaacctcctccaaccggctgtcagggaagcgtgatcagctttccatctcctagaagcggccctggctctcctgctcagtggctgctgtatacacaccccacacacagctggcagagagccgatctgggcgcctacctgaatcctagacctcctgctcctgaggcttggagcgaacctgttctgctggccaagggcagcgctgcctacagcgatctgcagtctatgggcacaggccctgatggcagccctctgtttggctgtctgtacgaggccaacgactacgaagagatcgtgttcctgatgttcaccctgaagcaggcctttccagccgagtacctgcctcaagagcccaaatcttctgacaaaactcacacatgcccaccgtgcccagcacctgaactcctggggggaccgtcagtcttcctcttccccccaaaacccaaggacaccctcatgatctcccggacccctgaggtcacatgcgtggtggtggacgtgagccacgaagaccctgaggtcaagttcaactggtacgtggacggcgtggaggtgcataatgccaagacaaagccgcgggaggagcagtacgccagcacgtaccgtgtggtcagcgtcctcaccgtcctgcaccaggactggctgaatggcaaggagtacaagtgcaaggtctccaacaaagccctcccagcccccatcgagaaaaccatctccaaagccaaagggcagccccgagaaccacaggtctacaccctgcccccatcccgggaggagatgaccaagaaccaggtcagcctgacctgcctggtcaaaggcttctatcccagcgacatcgccgtggagtgggagagcaatgggcagccggagaacaactacaagaccacgcctcccgtgctggactccgacggctccttcttcctctatagcaagctcaccgtggacaagagcaggtggcagcaggggaacgtcttctcatgctccgtgatgcatgaggctctgcacaaccactacacgcagaagagcctaagcttgtctccgggtaaa

SEQ ID NO: 220 - protein, 612 aa, Artificial Sequence
  Description of Artificial Sequence: Synthetic polypeptide
DASLPYLQKESVFQSGAHAYRIPALLYLPGQQSLLAFAEQRRSKKDEHAELIVLRRGDYDAGTHQVQWQAQEVVAQARLDGHRSMNPCPLYDEQTGTLFLFFIAIPGQVTEEQQLQTRANVTRLCYVTSTDHGRTWSSPRDLTDAAIGPAYREWSTFAVGPGHCLQLHDRARSLVVPAYAYRKLHPKQRPIPSAFCFLSHDHGRTWARGHFVAQDTLECQVAEVETGEQRVVTLNARSHLRFRVQAQSTNDGLDFQESQLVKKLVEPPPTGCQGSVISFPSPRSGPGSPAQWLLYTHPTHSWQRADLGAYLNPRPPAPEAWSEPVLLAKGSAAYSDLQSMGTGPDGSPLFGCLYEANDYEEIVFLMFTLKQAFPAEYLPQEPKSSDKTHTCPPCPAPELLGGPSVFLFPPKPKDTLMISRTPEVTCVVVDVSHEDPEVKFNWYVDGVEVHNAKTKPREEQYNSTYRVVSVLTVLHQDWLNGKEYKCKVSNKALPAPIEKTISKAKGQPREPQVYTLPPSREEMTKNQVSLTCLVKGFYPSDIAVEWESNGQPENNYKTTPPVLDSDGSFFLYSKLTVDKSRWQQGNVFSCSVMHEALHNHYTQKSLSLSPGK

SEQ ID NO: 221 - DNA, 1836 bp, Artificial Sequence
  Description of Artificial Sequence: Synthetic polynucleotide
gatgcatctctgccttacctgcagaaagaaagcgtgttccagtctggcgcccacgcctacagaattcccgctctgctgtatctgccaggccagcagtctctgctggctttcgctgaacagcggcggagcaagaaggatgagcacgccgaactgatcgtgctgcggagaggcgattacgacgccggcacacatcaggtgcagtggcaggctcaagaggtggtggctcaggctagactggacggccacagatctatgaacccctgtcctctgtacgatgaacagaccggcacactgtttctgttctttatcgctatccccggccaagtgaccgaggaacagcagctgcagacaagagccaacgtgaccagactgtgttacgtgacctccaccgaccacggcagaacctggtctagccctagagatctgaccgacgccgccatcggacctgcctatagagagtggtccaccttcgccgttggacctggacactgtctccagctgcacgacagggctagatctctggtggtgcctgcctacgcctatagaaagctgcaccccaaacagcggcctattcctagcgccttctgctttctgagccacgatcacggcaggacatgggccagaggacatttcgtggcccaggacacactggaatgccaggtggccgaagtggaaaccggcgagcagagagtcgtgaccctgaacgccagatctcacctgagattcagagtgcaggcccagagcacaaacgacggcctggatttccaagagagccagctggtcaagaaactggtggaacctcctccaaccggctgtcagggaagcgtgatcagctttccatctcctagaagcggccctggctctcctgctcagtggctgctgtatacacaccccacacacagctggcagagagccgatctgggcgcctacctgaatcctagacctcctgctcctgaggcttggagcgaacctgttctgctggccaagggcagcgctgcctacagcgatctgcagtctatgggcacaggccctgatggcagccctctgtttggctgtctgtacgaggccaacgactacgaagagatcgtgttcctgatgttcaccctgaagcaggcctttccagccgagtacctgcctcaagagcccaaatcttctgacaaaactcacacatgcccaccgtgcccagcacctgaactcctggggggaccgtcagtcttcctcttccccccaaaacccaaggacaccctcatgatctcccggacccctgaggtcacatgcgtggtggtggacgtgagccacgaagaccctgaggtcaagttcaactggtacgtggacggcgtggaggtgcataatgccaagacaaagccgcgggaggagcagtacaacagcacgtaccgtgtggtcagcgtcctcaccgtcctgcaccaggactggctgaatggcaaggagtacaagtgcaaggtctccaacaaagccctcccagcccccatcgagaaaaccatctccaaagccaaagggcagccccgagaaccacaggtctacaccctgcccccatcccgggaggagatgaccaagaaccaggtcagcctgacctgcctggtcaaaggcttctatcccagcgacatcgccgtggagtgggagagcaatgggcagccggagaacaactacaagaccacgcctcccgtgctggactccgacggctccttcttcctctatagcaagctcaccgtggacaagagcaggtggcagcaggggaacgtcttctcatgctccgtgatgcatgaggctctgcacaaccactacacgcagaagagcctctccctgtctccgggtaaa

SEQ ID NO: 222 - protein, 612 aa, Artificial Sequence
  Description of Artificial Sequence: Synthetic polypeptide
DASLPYLQKESVFQSGAHAYRIPALLYLPGQQSLLAFAEQRRSKKDEHAELIVLRRGDYDAGTHQVQWQAQEVVAQARLDGHRSMNPCPLYDEQTGTLFLFFIAIPGQVTEQQQLQTRANVTRLCYVTSTDHGRTWSSPRDLTDAAIGPAYREWSTFAVGPGHCLQLHDRARSLVVPAYAYRKLHPKQRPIPSAFCFLSHDHGRTWARGHFVAQDTLECQVAEVCTGEQRVVTLNARSHLRFRVQAQSTNDGLDFQESQLVKKLVEPPPTGCQGSVISFPSPRSGPGSPCQWLLYTHPTHSWQRADLGAYLNPRPPAPEAWSEPVLLAKGSAAYSDLQSMGTGPDGSPLFGCLYEANDYEEIVFLMFTLKQAFPAEYLPQEPKSSDKTHTCPPCPAPELLGGPSVFLFPPKPKDTLMISRTPEVTCVVVDVSHEDPEVKFNWYVDGVEVHNAKTKPREEQYNSTYRVVSVLTVLHQDWLNGKEYKCKVSNKALPAPIEKTISKAKGQPREPQVYTLPPSREEMTKNQVSLTCLVKGFYPSDIAVEWESNGQPENNYKTTPPVLDSDGSFFLYSKLTVDKSRWQQGNVFSCSVMHEALHNHYTQKSLSLSPGK

SEQ ID NO: 223 - DNA, 1836 bp, Artificial Sequence
  Description of Artificial Sequence: Synthetic polynucleotide
gatgcatctctgccttacctgcagaaagaaagcgtgttccagtctggcgcccacgcctacagaattcccgctctgctgtatctgccaggccagcagtctctgctggctttcgctgaacagcggcggagcaagaaggatgagcacgccgaactgatcgtgctgcggagaggcgattacgacgccggcacacatcaggtgcagtggcaggctcaagaggtggtggctcaggctagactggacggccacagatctatgaacccctgtcctctgtacgatgaacagaccggcacactgtttctgttctttatcgctatccccggccaagtgaccgagcagcagcagctgcagacaagagccaacgtgaccagactgtgttacgtgacctccaccgaccacggcagaacctggtctagccctagagatctgaccgacgccgccatcggacctgcctatagagagtggtccaccttcgccgttggacctggacactgtctccagctgcacgacagggctagatctctggtggtgcctgcctacgcctatagaaagctgcaccccaaacagcggcctattcctagcgccttctgctttctgagccacgatcacggcaggacatgggccagaggacatttcgtggcccaggacacactggaatgccaggtggccgaagtgtgtaccggcgagcagagagtcgtgaccctgaacgccagatctcacctgagattcagagtgcaggcccagagcacaaacgacggcctggatttccaagagagccagctggtcaagaaactggtggaacctcctccaaccggctgtcagggaagcgtgatcagctttccatctcctagaagcggccctggctctccttgtcagtggctgctgtatacacaccccacacacagctggcagagagccgatctgggcgcctacctgaatcctagacctcctgctcctgaggcttggagcgaacctgttctgctggccaagggcagcgctgcctacagcgatctgcagtctatgggcacaggccctgatggcagccctctgtttggctgtctgtacgaggccaacgactacgaagagatcgtgttcctgatgttcaccctgaagcaggcctttccagccgagtacctgcctcaagagcccaaatcttctgacaaaactcacacatgcccaccgtgcccagcacctgaactcctggggggaccgtcagtcttcctcttccccccaaaacccaaggacaccctcatgatctcccggacccctgaggtcacatgcgtggtggtggacgtgagccacgaagaccctgaggtcaagttcaactggtacgtggacggcgtggaggtgcataatgccaagacaaagccgcgggaggagcagtacaacagcacgtaccgtgtggtcagcgtcctcaccgtcctgcaccaggactggctgaatggcaaggagtacaagtgcaaggtctccaacaaagccctcccagcccccatcgagaaaaccatctccaaagccaaagggcagccccgagaaccacaggtctacaccctgcccccatcccgggaggagatgaccaagaaccaggtcagcctgacctgcctggtcaaaggcttctatcccagcgacatcgccgtggagtgggagagcaatgggcagccggagaacaactacaagaccacgcctcccgtgctggactccgacggctccttcttcctctatagcaagctcaccgtggacaagagcaggtggcagcaggggaacgtcttctcatgctccgtgatgcatgaggctctgcacaaccactacacgcagaagagcctctccctgtctccgggtaaa

SEQ ID NO: 224 - protein, 611 aa, Artificial Sequence
  Description of Artificial Sequence: Synthetic polypeptide
ASLPYLQKESVFQSGAHAYRIPALLYLPGQQSLLAFAEQRRSKKDEHAELIVLRRGDYDAGTHQVQWQAQEVVAQARLDGHRSMNPCPLYDEQTGTLFLFFIAIPGQVTEQQQLQTRANVTRLCYVTSTDHGRTWSSPRDLTDAAIGPAYREWSTFAVGPGHCLQLHDRARSLVVPAYAYRKLHPKQRPIPSAFCFLSHDHGRTWARGHFVAQDTLECQVAEVETGEQRVVTLNARSHLRFRVQAQSTNDGLDFQESQLVKKLVEPPPTGCQGSVISFPSPRSGPGSPAQWLLYTHPTHSWQRADLGAYLNPRPPAPEAWSEPVLLAKGSAAYSDLQSMGTGPDGSPLFGCLYEANDYEEIVFLMFTLKQAFPAEYLPQEPKSSDKTHTCPPCPAPELLGGPSVFLFPPKPKDTLMISRTPEVTCVVVDVSHEDPEVKFNWYVDGVEVHNAKTKPREEQYNSTYRVVSVLTVLHQDWLNGKEYKCKVSNKALPAPIEKTISKAKGQPREPQVYTLPPSREEMTKNQVSLTCLVKGFYPSDIAVEWESNGQPENNYKTTPPVLDSDGSFFLYSKLTVDKSRWQQGNVFSCSVMHEALHNHYTQKSLSLSPGK

SEQ ID NO: 225 - DNA, 1833 bp, Artificial Sequence
  Description of Artificial Sequence: Synthetic polynucleotide
gcatctctgccttacctgcagaaagaaagcgtgttccagtctggcgcccacgcctacagaattcccgctctgctgtatctgccaggccagcagtctctgctggctttcgctgaacagcggcggagcaagaaggatgagcacgccgaactgatcgtgctgcggagaggcgattacgacgccggcacacatcaggtgcagtggcaggctcaagaggtggtggctcaggctagactggacggccacagatctatgaacccctgtcctctgtacgatgaacagaccggcacactgtttctgttctttatcgctatccccggccaagtgaccgagcagcagcagctgcagacaagagccaacgtgaccagactgtgttacgtgacctccaccgaccacggcagaacctggtctagccctagagatctgaccgacgccgccatcggacctgcctatagagagtggtccaccttcgccgttggacctggacactgtctccagctgcacgacagggctagatctctggtggtgcctgcctacgcctatagaaagctgcaccccaaacagcggcctattcctagcgccttctgctttctgagccacgatcacggcaggacatgggccagaggacatttcgtggcccaggacacactggaatgccaggtggccgaagtggaaaccggcgagcagagagtcgtgaccctgaacgccagatctcacctgagattcagagtgcaggcccagagcacaaacgacggcctggatttccaagagagccagctggtcaagaaactggtggaacctcctccaaccggctgtcagggaagcgtgatcagctttccatctcctagaagcggccctggctctcctgctcagtggctgctgtatacacaccccacacacagctggcagagagccgatctgggcgcctacctgaatcctagacctcctgctcctgaggcttggagcgaacctgttctgctggccaagggcagcgctgcctacagcgatctgcagtctatgggcacaggccctgatggcagccctctgtttggctgtctgtacgaggccaacgactacgaagagatcgtgttcctgatgttcaccctgaagcaggcctttccagccgagtacctgcctcaagagcccaaatcttctgacaaaactcacacatgcccaccgtgcccagcacctgaactcctggggggaccgtcagtcttcctcttccccccaaaacccaaggacaccctcatgatctcccggacccctgaggtcacatgcgtggtggtggacgtgagccacgaagaccctgaggtcaagttcaactggtacgtggacggcgtggaggtgcataatgccaagacaaagccgcgggaggagcagtacaacagcacgtaccgtgtggtcagcgtcctcaccgtcctgcaccaggactggctgaatggcaaggagtacaagtgcaaggtctccaacaaagccctcccagcccccatcgagaaaaccatctccaaagccaaagggcagccccgagaaccacaggtctacaccctgcccccatcccgggaggagatgaccaagaaccaggtcagcctgacctgcctggtcaaaggcttctatcccagcgacatcgccgtggagtgggagagcaatgggcagccggagaacaactacaagaccacgcctcccgtgctggactccgacggctccttcttcctctatagcaagctcaccgtggacaagagcaggtggcagcaggggaacgtcttctcatgctccgtgatgcatgaggctctgcacaaccactacacgcagaagagcctctccctgtctccgggtaaa

SEQ ID NO: 226 - protein, 612 aa, Artificial Sequence
  Description of Artificial Sequence: Synthetic polypeptide
DASLPVLQKESVFQSGAHAYRIPALLYLPGQQSLLAFAEQRRSKKDEHAELIVLRRGDYDAGTHQVQWQAQEVVAQARLDGHRSMNPCPLYDEQTGTLFLFFIAIPGQVTEQQQLQTRANVTRLCYVTSTDHGRTWSSPRDLTDAAIGPAYREWSTFAVGPGHCLQLHDRARSLVVPAYAYRKLHPKQRPIPSAFCFLSHDHGRTWARGHFVAQDTLECQVAEVETGEQRVVTLNARSHLRFRVQAQSTNDGLDFQESQLVKKLVEPPPTGCQGSVISFPSPRSGPGSPAQWLLYTHPTHSWQRADLGAYLNPRPPAPEAWSEPVLLAKGSAAYSDLQSMGTGPDGSPLFGCLYEANDYEEIVFLMFTLKQAFPAEYLPQEPKSSDKTHTCPPCPAPELLGGPSVFLFPPKPKDTLMISRTPEVTCVVVDVSHEDPEVKFNWYVDGVEVHNAKTKPREEQYNSTYRVVSVLTVLHQDWLNGKEYKCKVSNKALPAPIEKTISKAKGQPREPQVYTLPPSREEMTKNQVSLTCLVKGFYPSDIAVEWESNGQPENNYKTTPPVLDSDGSFFLYSKLTVDKSRWQQGNVFSCSVMHEALHNHYTQKSLSLSPGK

SEQ ID NO: 227 - DNA, 1836 bp, Artificial Sequence
  Description of Artificial Sequence: Synthetic polynucleotide
gatgcatctctgcctgtgctgcagaaagaaagcgtgttccagtctggcgcccacgcctacagaattcccgctctgctgtatctgccaggccagcagtctctgctggctttcgctgaacagcggcggagcaagaaggatgagcacgccgaactgatcgtgctgcggagaggcgattacgacgccggcacacatcaggtgcagtggcaggctcaagaggtggtggctcaggctagactggacggccacagatctatgaacccctgtcctctgtacgatgaacagaccggcacactgtttctgttctttatcgctatccccggccaagtgaccgagcagcagcagctgcagacaagagccaacgtgaccagactgtgttacgtgacctccaccgaccacggcagaacctggtctagccctagagatctgaccgacgccgccatcggacctgcctatagagagtggtccaccttcgccgttggacctggacactgtctccagctgcacgacagggctagatctctggtggtgcctgcctacgcctatagaaagctgcaccccaaacagcggcctattcctagcgccttctgctttctgagccacgatcacggcaggacatgggccagaggacatttcgtggcccaggacacactggaatgccaggtggccgaagtggaaaccggcgagcagagagtcgtgaccctgaacgccagatctcacctgagattcagagtgcaggcccagagcacaaacgacggcctggatttccaagagagccagctggtcaagaaactggtggaacctcctccaaccggctgtcagggaagcgtgatcagctttccatctcctagaagcggccctggctctcctgctcagtggctgctgtatacacaccccacacacagctggcagagagccgatctgggcgcctacctgaatcctagacctcctgctcctgaggcttggagcgaacctgttctgctggccaagggcagcgctgcctacagcgatctgcagtctatgggcacaggccctgatggcagccctctgtttggctgtctgtacgaggccaacgactacgaagagatcgtgttcctgatgttcaccctgaagcaggcctttccagccgagtacctgcctcaagagcccaaatcttctgacaaaactcacacatgcccaccgtgcccagcacctgaactcctggggggaccgtcagtcttcctcttccccccaaaacccaaggacaccctcatgatctcccggacccctgaggtcacatgcgtggtggtggacgtgagccacgaagaccctgaggtcaagttcaactggtacgtggacggcgtggaggtgcataatgccaagacaaagccgcgggaggagcagtacaacagcacgtaccgtgtggtcagcgtcctcaccgtcctgcaccaggactggctgaatggcaaggagtacaagtgcaaggtctccaacaaagccctcccagcccccatcgagaaaaccatctccaaagccaaagggcagccccgagaaccacaggtctacaccctgcccccatcccgggaggagatgaccaagaaccaggtcagcctgacctgcctggtcaaaggcttctatcccagcgacatcgccgtggagtgggagagcaatgggcagccggagaacaactacaagaccacgcctcccgtgctggactccgacggctccttcttcctctatagcaagctcaccgtggacaagagcaggtggcagcaggggaacgtcttctcatgctccgtgatgcatgaggctctgcacaaccactacacgcagaagagcctctccctgtctccgggtaaa

SEQ ID NO: 228 - protein, 612 aa, Artificial Sequence; identical to SEQ ID NO: 163
  Description of Artificial Sequence: Synthetic polypeptide

SEQ ID NO: 229 - DNA, 1836 bp, Artificial Sequence
  Description of Artificial Sequence: Synthetic polynucleotide
gatgcatctctgccttacctgcagaaagaaagcgtgttccagtctggcgcccacgcctacagaattcccgctctgctgtatctgccaggccagcagtctctgctggctttcgctgaacagcgggccagcaagaaggatgagcacgccgaactgatcgtgctgcggagaggcgattacgacgccggcacacatcaggtgcagtggcaggctcaagaggtggtggctcaggctagactggacggccacagatctatgaacccctgtcctctgtacgatgaacagaccggcacactgtttctgttctttatcgctatccccggccaagtgaccgagcagcagcagctgcagacaagagccaacgtgaccagactgtgttacgtgacctccaccgaccacggcagaacctggtctagccctagagatctgaccgacgccgccatcggacctgcctatagagagtggtccaccttcgccgttggacctggacactgtctccagctgcacgacagggctagatctctggtggtgcctgcctacgcctatagaaagctgcaccccaaacagcggcctattcctagcgccttctgctttctgagccacgatcacggcaggacatgggccagaggacatttcgtggcccaggacacactggaatgccaggtggccgaagtggaaaccggcgagcagagagtcgtgaccctgaacgccagatctcacctgagattcagagtgcaggcccagagcacaaacgacggcctggatttccaagagagccagctggtcaagaaactggtggaacctcctccaaccggctgtcagggaagcgtgatcagctttccatctcctagaagcggccctggctctcctgctcagtggctgctgtatacacaccccacacacagctggcagagagccgatctgggcgcctacctgaatcctagacctcctgctcctgaggcttggagcgaacctgttctgctggccaagggcagcgctgcctacagcgatctgcagtctatgggcacaggccctgatggcagccctctgtttggctgtctgtacgaggccaacgactacgaagagatcgtgttcctgatgttcaccctgaagcaggcctttccagccgagtacctgcctcaagagcccaaatcttctgacaaaactcacacatgcccaccgtgcccagcacctgaactcctggggggaccgtcagtcttcctcttccccccaaaacccaaggacaccctcatgatctcccggacccctgaggtcacatgcgtggtggtggacgtgagccacgaagaccctgaggtcaagttcaactggtacgtggacggcgtggaggtgcataatgccaagacaaagccgcgggaggagcagtacaacagcacgtaccgtgtggtcagcgtcctcaccgtcctgcaccaggactggctgaatggcaaggagtacaagtgcaaggtctccaacaaagccctcccagcccccatcgagaaaaccatctccaaagccaaagggcagccccgagaaccacaggtctacaccctgcccccatcccgggaggagatgaccaagaaccaggtcagcctgacctgcctggtcaaaggcttctatcccagcgacatcgccgtggagtgggagagcaatgggcagccggagaacaactacaagaccacgcctcccgtgctggactccgacggctccttcttcctctatagcaagctcaccgtggacaagagcaggtggcagcaggggaacgtcttctcatgctccgtgatgcatgaggctctgcacaaccactacacgcagaagagcctctccctgtctccgggtaaa

SEQ ID NO: 230 - protein, 612 aa, Artificial Sequence
  Description of Artificial Sequence: Synthetic polypeptide
DASLPYLQKESVFQSGAHAYRIPALLYLPGQQSLLAFAEQRRSKKDEHAELIVLRRGDYDAPTHQVQWQAQEVVAQARLDGHRSMNPCPLYDEQTGTLFLFFIAIPGQVTEQQQLQTRANVTRLCYVTSTDHGRTWSSPRDLTDAAIGPAYREWSTFAVGPGHCLQLHDRARSLVVPAYAYRKLHPKQRPIPSAFCFLSHDHGRTWARGHFVAQDTLECQVAEVETGEQRVVTLNARSHLRFRVQAQSTNDGLDFQESQLVKKLVEPPPTGCQGSVISFPSPRSGPGSPAQWLLYTHPTHSWQRADLGAYLNPRPPAPEAWSEPVLLAKGSAAYSDLQSMGTGPDGSPLFGCLYEANDYEEIVFLMFTLKQAFPAEYLPQEPKSSDKTHTCPPCPAPELLGGPSVFLFPPKPKDTLMISRTPEVTCVVVDVSHEDPEVKFNWYVDGVEVHNAKTKPREEQYNSTYRVVSVLTVLHQDWLNGKEYKCKVSNKALPAPIEKTISKAKGQPREPQVYTLPPSREEMTKNQVSLTCLVKGFYPSDIAVEWESNGQPENNYKTTPPVLDSDGSFFLYSKLTVDKSRWQQGNVFSCSVMHEALHNHYTQKSLSLSPGK

SEQ ID NO: 231 - DNA, 1836 bp, Artificial Sequence
  Description of Artificial Sequence: Synthetic polynucleotide
gatgcatctctgccttacctgcagaaagaaagcgtgttccagtctggcgcccacgcctacagaattcccgctctgctgtatctgccaggccagcagtctctgctggctttcgctgaacagcggcggagcaagaaggatgagcacgccgaactgatcgtgctgcggagaggcgattacgacgcccctacacatcaggtgcagtggcaggctcaagaggtggtggctcaggctagactggacggccacagatctatgaacccctgtcctctgtacgatgaacagaccggcacactgtttctgttctttatcgctatccccggccaagtgaccgagcagcagcagctgcagacaagagccaacgtgaccagactgtgttacgtgacctccaccgaccacggcagaacctggtctagccctagagatctgaccgacgccgccatcggacctgcctatagagagtggtccaccttcgccgttggacctggacactgtctccagctgcacgacagggctagatctctggtggtgcctgcctacgcctatagaaagctgcaccccaaacagcggcctattcctagcgccttctgctttctgagccacgatcacggcaggacatgggccagaggacatttcgtggcccaggacacactggaatgccaggtggccgaagtggaaaccggcgagcagagagtcgtgaccctgaacgccagatctcacctgagattcagagtgcaggcccagagcacaaacgacggcctggatttccaagagagccagctggtcaagaaactggtggaacctcctccaaccggctgtcagggaagcgtgatcagctttccatctcctagaagcggccctggctctcctgctcagtggctgctgtatacacaccccacacacagctggcagagagccgatctgggcgcctacctgaatcctagacctcctgctcctgaggcttggagcgaacctgttctgctggccaagggcagcgctgcctacagcgatctgcagtctatgggcacaggccctgatggcagccctctgtttggctgtctgtacgaggccaacgactacgaagagatcgtgttcctgatgttcaccctgaagcaggcctttccagccgagtacctgcctcaagagcccaaatcttctgacaaaactcacacatgcccaccgtgcccagcacctgaactcctggggggaccgtcagtcttcctcttccccccaaaacccaaggacaccctcatgatctcccggacccctgaggtcacatgcgtggtggtggacgtgagccacgaagaccctgaggtcaagttcaactggtacgtggacggcgtggaggtgcataatgccaagacaaagccgcgggaggagcagtacaacagcacgtaccgtgtggtcagcgtcctcaccgtcctgcaccaggactggctgaatggcaaggagtacaagtgcaaggtctccaacaaagccctcccagcccccatcgagaaaaccatctccaaagccaaagggcagccccgagaaccacaggtctacaccctgcccccatcccgggaggagatgaccaagaaccaggtcagcctgacctgcctggtcaaaggcttctatcccagcgacatcgccgtggagtgggagagcaatgggcagccggagaacaactacaagaccacgcctcccgtgctggactccgacggctccttcttcctctatagcaagctcaccgtggacaagagcaggtggcagcaggggaacgtcttctcatgctccgtgatgcatgaggctctgcacaaccactacacgcagaagagcctctccctgtctccgggtaaa

SEQ ID NO: 232 - protein, 612 aa, Artificial Sequence
  Description of Artificial Sequence: Synthetic polypeptide
DASLPYLQKESVFQSGAHAYRIPALLYLPGQQSLLAFAEQRRSKKDEHAELIVLRRGDYDAGTHQVQWQAQEVVAQARLDGHRSMNPCPLYDAQTGTLFLFFIAIPGQVTEQQQLQTRANVTRLCYVTSTDHGRTWSSPRDLTDAAIGPAYREWSTFAVGPGHCLQLHDRARSLVVPAYAYRKLHPKQRPIPSAFCFLSHDHGRTWARGHFVAQDTLECQVAEVETGEQRVVTLNARSHLRFRVQAQSTNDGLDFQESQLVKKLVEPPPTGCQGSVISFPSPRSGPGSPAQWLLYTHPTHSWQRADLGAYLNPRPPAPEAWSEPVLLAKGSAAYSDLQSMGTGPDGSPLFGCLYEANDYEEIVFLMFTLKQAFPAEYLPQEPKSSDKTHTCPPCPAPELLGGPSVFLFPPKPKDTLMISRTPEVTCVVVDVSHEDPEVKFNWYVDGVEVHNAKTKPREEQYNSTYRVVSVLTVLHQDWLNGKEYKCKVSNKALPAPIEKTISKAKGQPREPQVYTLPPSREEMTKNQVSLTCLVKGFYPSDIAVEWESNGQPENNYKTTPPVLDSDGSFFLYSKLTVDKSRWQQGNVFSCSVMHEALHNHYTQKSLSLSPGK

SEQ ID NO: 233 - DNA, 1836 bp, Artificial Sequence
  Description of Artificial Sequence: Synthetic polynucleotide
gatgcatctctgccttacctgcagaaagaaagcgtgttccagtctggcgcccacgcctacagaattcccgctctgctgtatctgccaggccagcagtctctgctggctttcgctgaacagcggcggagcaagaaggatgagcacgccgaactgatcgtgctgcggagaggcgattacgacgccggcacacatcaggtgcagtggcaggctcaagaggtggtggctcaggctagactggacggccacagatctatgaacccctgtcctctgtacgatgcccagaccggcacactgtttctgttctttatcgctatccccggccaagtgaccgagcagcagcagctgcagacaagagccaacgtgaccagactgtgttacgtgacctccaccgaccacggcagaacctggtctagccctagagatctgaccgacgccgccatcggacctgcctatagagagtggtccaccttcgccgttggacctggacactgtctccagctgcacgacagggctagatctctggtggtgcctgcctacgcctatagaaagctgcaccccaaacagcggcctattcctagcgccttctgctttctgagccacgatcacggcaggacatgggccagaggacatttcgtggcccaggacacactggaatgccaggtggccgaagtggaaaccggcgagcagagagtcgtgaccctgaacgccagatctcacctgagattcagagtgcaggcccagagcacaaacgacggcctggatttccaagagagccagctggtcaagaaactggtggaacctcctccaaccggctgtcagggaagcgtgatcagctttccatctcctagaagcggccctggctctcctgctcagtggctgctgtatacacaccccacacacagctggcagagagccgatctgggcgcctacctgaatcctagacctcctgctcctgaggcttggagcgaacctgttctgctggccaagggcagcgctgcctacagcgatctgcagtctatgggcacaggccctgatggcagccctctgtttggctgtctgtacgaggccaacgactacgaagagatcgtgttcctgatgttcaccctgaagcaggcctttccagccgagtacctgcctcaagagcccaaatcttctgacaaaactcacacatgcccaccgtgcccagcacctgaactcctggggggaccgtcagtcttcctcttccccccaaaacccaaggacaccctcatgatctcccggacccctgaggtcacatgcgtggtggtggacgtgagccacgaagaccctgaggtcaagttcaactggtacgtggacggcgtggaggtgcataatgccaagacaaagccgcgggaggagcagtacaacagcacgtaccgtgtggtcagcgtcctcaccgtcctgcaccaggactggctgaatggcaaggagtacaagtgcaaggtctccaacaaagccctcccagcccccatcgagaaaaccatctccaaagccaaagggcagccccgagaaccacaggtctacaccctgcccccatcccgggaggagatgaccaagaaccaggtcagcctgacctgcctggtcaaaggcttctatcccagcgacatcgccgtggagtgggagagcaatgggcagccggagaacaactacaagaccacgcctcccgtgctggactccgacggctccttcttcctctatagcaagctcaccgtggacaagagcaggtggcagcaggggaacgtcttctcatgctccgtgatgcatgaggctctgcacaaccactacacgcagaagagcctctccctgtctccgggtaaa

SEQ ID NO: 234 - protein, 612 aa, Artificial Sequence
  Description of Artificial Sequence: Synthetic polypeptide
DASLPYLQKESVFQSGAHAYRIPALLYLPGQQSLLAFAEQRRSKKDEHAELIVLRRGDYDAGTHQVQWQAQEVVAQARLDGHRSMNPCPLYDEQTGTLFLFFIAIPGQVTEQQQLQTRANVTRLCQVTSTDHGRTWSSPRDLTDAAIGPAYREWSTFAVGPGHCLQLHDRARSLVVPAYAYRKLHPKQRPIPSAFCFLSHDHGRTWARGHFVAQDTLECQVAEVETGEQRVVTLNARSHLRFRVQAQSTNDGLDFQESQLVKKLVEPPPTGCQGSVISFPSPRSGPGSPAQWLLYTHPTHSWQRADLGAYLNPRPPAPEAWSEPVLLAKGSAAYSDLQSMGTGPDGSPLFGCLYEANDYEEIVFLMFTLKQAFPAEYLPQEPKSSDKTHTCPPCPAPELLGGPSVFLFPPKPKDTLMISRTPEVTCVVVDVSHEDPEVKFNWYVDGVEVHNAKTKPREEQYNSTYRVVSVLTVLHQDWLNGKEYKCKVSNKALPAPIEKTISKAKGQPREPQVYTLPPSREEMTKNQVSLTCLVKGFYPSDIAVEWESNGQPENNYKTTPPVLDSDGSFFLYSKLTVDKSRWQQGNVFSCSVMHEALHNHYTQKSLSLSPGK

SEQ ID NO: 235 - DNA, 1836 bp, Artificial Sequence
  Description of Artificial Sequence: Synthetic polynucleotide
gatgcatctctgccttacctgcagaaagaaagcgtgttccagtctggcgcccacgcctacagaattcccgctctgctgtatctgccaggccagcagtctctgctggctttcgctgaacagcggcggagcaagaaggatgagcacgccgaactgatcgtgctgcggagaggcgattacgacgccggcacacatcaggtgcagtggcaggctcaagaggtggtggctcaggctagactggacggccacagatctatgaacccctgtcctctgtacgatgaacagaccggcacactgtttctgttctttatcgctatccccggccaagtgaccgagcagcagcagctgcagacaagagccaacgtgaccagactgtgtcaggtgacctccaccgaccacggcagaacctggtctagccctagagatctgaccgacgccgccatcggacctgcctatagagagtggtccaccttcgccgttggacctggacactgtctccagctgcacgacagggctagatctctggtggtgcctgcctacgcctatagaaagctgcaccccaaacagcggcctattcctagcgccttctgctttctgagccacgatcacggcaggacatgggccagaggacatttcgtggcccaggacacactggaatgccaggtggccgaagtggaaaccggcgagcagagagtcgtgaccctgaacgccagatctcacctgagattcagagtgcaggcccagagcacaaacgacggcctggatttccaagagagccagctggtcaagaaactggtggaacctcctccaaccggctgtcagggaagcgtgatcagctttccatctcctagaagcggccctggctctcctgctcagtggctgctgtatacacaccccacacacagctggcagagagccgatctgggcgcctacctgaatcctagacctcctgctcctgaggcttggagcgaacctgttctgctggccaagggcagcgctgcctacagcgatctgcagtctatgggcacaggccctgatggcagccctctgtttggctgtctgtacgaggccaacgactacgaagagatcgtgttcctgatgttcaccctgaagcaggcctttccagccgagtacctgcctcaagagcccaaatcttctgacaaaactcacacatgcccaccgtgcccagcacctgaactcctggggggaccgtcagtcttcctcttccccccaaaacccaaggacaccctcatgatctcccggacccctgaggtcacatgcgtggtggtggacgtgagccacgaagaccctgaggtcaagttcaactggtacgtggacggcgtggaggtgcataatgccaagacaaagccgcgggaggagcagtacaacagcacgtaccgtgtggtcagcgtcctcaccgtcctgcaccaggactggctgaatggcaaggagtacaagtgcaaggtctccaacaaagccctcccagcccccatcgagaaaaccatctccaaagccaaagggcagccccgagaaccacaggtctacaccctgcccccatcccgggaggagatgaccaagaaccaggtcagcctgacctgcctggtcaaaggcttctatcccagcgacatcgccgtggagtgggagagcaatgggcagccggagaacaactacaagaccacgcctcccgtgctggactccgacggctccttcttcctctatagcaagctcaccgtggacaagagcaggtggcagcaggggaacgtcttctcatgctccgtgatgcatgaggctctgcacaaccactacacgcagaagagcctctccctgtctccgggtaaa

SEQ ID NO: 236 - protein, 612 aa, Artificial Sequence
  Description of Artificial Sequence: Synthetic polypeptide
DASLPYLQKESVFQSGAHAYRIPALLYLPGQQSLLAFAEQRRSKKDEHAELIVLRRGDYDAGTHQVQWQAQEVVAQARLDGHRSMNPCPLYDEQTGTLFLFFIAIPGQVTEQQQLQTRANVTRLCYVTSTDHGRTWSSPRDLTDAAIGPAYREWSTFAVGPGHCLQLHDRARSLVVPAYAYRKLHPIQRPIPSAFCFLSHDHGRTWARGHFVAQDTLECQVAEVETGEQRVVTLNARSHLRFRVQAQSTNDGLDFQESQLVKKLVEPPPTGCQGSVISFPSPRSGPGSPAQWLLYTHPTHSWQRADLGAYLNPRPPAPEAWSEPVLLAKGSAAYSDLQSMGTGPDGSPLFGCLYEANDYEEIVFLMFTLKQAFPAEYLPQEPKSSDKTHTCPPCPAPELLGGPSVFLFPPKPKDTLMISRTPEVTCVVVDVSHEDPEVKFNWYVDGVEVHNAKTKPREEQYNSTYRVVSVLTVLHQDWLNGKEYKCKVSNKALPAPIEKTISKAKGQPREPQVYTLPPSREEMTKNQVSLTCLVKGFYPSDIAVEWESNGQPENNYKTTPPVLDSDGSFFLYSKLTVDKSRWQQGNVFSCSVMHEALHNHYTQKSLSLSPGK

SEQ ID NO: 237 - DNA, 1836 bp, Artificial Sequence
  Description of Artificial Sequence: Synthetic polynucleotide
gatgcatctctgccttacctgcagaaagaaagcgtgttccagtctggcgcccacgcctacagaattcccgctctgctgtatctgccaggccagcagtctctgctggctttcgctgaacagcggcggagcaagaaggatgagcacgccgaactgatcgtgctgcggagaggcgattacgacgccggcacacatcaggtgcagtggcaggctcaagaggtggtggctcaggctagactggacggccacagatctatgaacccctgtcctctgtacgatgaacagaccggcacactgtttctgttctttatcgctatccccggccaagtgaccgagcagcagcagctgcagacaagagccaacgtgaccagactgtgttacgtgacctccaccgaccacggcagaacctggtctagccctagagatctgaccgacgccgccatcggacctgcctatagagagtggtccaccttcgccgttggacctggacactgtctccagctgcacgacagggctagatctctggtggtgcctgcctacgcctatagaaagctgcaccccatccagcggcctattcctagcgccttctgctttctgagccacgatcacggcaggacatgggccagaggacatttcgtggcccaggacacactggaatgccaggtggccgaagtggaaaccggcgagcagagagtcgtgaccctgaacgccagatctcacctgagattcagagtgcaggcccagagcacaaacgacggcctggatttccaagagagccagctggtcaagaaactggtggaacctcctccaaccggctgtcagggaagcgtgatcagctttccatctcctagaagcggccctggctctcctgctcagtggctgctgtatacacaccccacacacagctggcagagagccgatctgggcgcctacctgaatcctagacctcctgctcctgaggcttggagcgaacctgttctgctggccaagggcagcgctgcctacagcgatctgcagtctatgggcacaggccctgatggcagccctctgtttggctgtctgtacgaggccaacgactacgaagagatcgtgttcctgatgttcaccctgaagcaggcctttccagccgagtacctgcctcaagagcccaaatcttctgacaaaactcacacatgcccaccgtgcccagcacctgaactcctggggggaccgtcagtcttcctcttccccccaaaacccaaggacaccctcatgatctcccggacccctgaggtcacatgcgtggtggtggacgtgagccacgaagaccctgaggtcaagttcaactggtacgtggacggcgtggaggtgcataatgccaagacaaagccgcgggaggagcagtacaacagcacgtaccgtgtggtcagcgtcctcaccgtcctgcaccaggactggctgaatggcaaggagtacaagtgcaaggtctccaacaaagccctcccagcccccatcgagaaaaccatctccaaagccaaagggcagccccgagaaccacaggtctacaccctgcccccatcccgggaggagatgaccaagaaccaggtcagcctgacctgcctggtcaaaggcttctatcccagcgacatcgccgtggagtgggagagcaatgggcagccggagaacaactacaagaccacgcctcccgtgctggactccgacggctccttcttcctctatagcaagctcaccgtggacaagagcaggtggcagcaggggaacgtcttctcatgctccgtgatgcatgaggctctgcacaaccactacacgcagaagagcctctccctgtctccgggtaaa

SEQ ID NO: 238 - protein, 612 aa, Artificial Sequence
  Description of Artificial Sequence: Synthetic polypeptide
DASLPYLQKESVFQSGAHAYRIPALLYLPGQQSLLAFAEQRRSKKDEHAELIVLRRGDYDAGTHQVQWQAQEVVAQARLDGHRSMNPCPLYDEQTGTLFLFFIAIPGQVTEQQQLQTRANVTRLCYVTSTDHGRTWSSPRDLTDAAIGPAYREWSTFAVGPGHCLQLHDRARSLVVPAYAYRKLHPKQRPIPSAFCFLSHDHGRTWARGHFVAQDTLECQVAEVETGEQRVVTLNARSHLRARVQAQSTNDGLDFQESQLVKKLVEPPPTGCQGSVISFPSPRSGPGSPAQWLLYTHPTHSWQRADLGAYLNPRPPAPEAWSEPVLLAKGSAAYSDLQSMGTGPDGSPLFGCLYEANDYEEIVFLMFTLKQAFPAEYLPQEPKSSDKTHTCPPCPAPELLGGPSVFLFPPKPKDTLMISRTPEVTCVVVDVSHEDPEVKFNWYVDGVEVHNAKTKPREEQYNSTYRVVSVLTVLHQDWLNGKEYKCKVSNKALPAPIEKTISKAKGQPREPQVYTLPPSREEMTKNQVSLTCLVKGFYPSDIAVEWESNGQPENNYKTTPPVLDSDGSFFLYSKLTVDKSRWQQGNVFSCSVMHEALHNHYTQKSLSLSPGK

SEQ ID NO: 239 - DNA, 1836 bp, Artificial Sequence
  Description of Artificial Sequence: Synthetic polynucleotide
gatgcatctctgccttacctgcagaaagaaagcgtgttccagtctggcgcccacgcctacagaattcccgctctgctgtatctgccaggccagcagtctctgctggctttcgctgaacagcggcggagcaagaaggatgagcacgccgaactgatcgtgctgcggagaggcgattacgacgccggcacacatcaggtgcagtggcaggctcaagaggtggtggctcaggctagactggacggccacagatctatgaacccctgtcctctgtacgatgaacagaccggcacactgtttctgttctttatcgctatccccggccaagtgaccgagcagcagcagctgcagacaagagccaacgtgaccagactgtgttacgtgacctccaccgaccacggcagaacctggtctagccctagagatctgaccgacgccgccatcggacctgcctatagagagtggtccaccttcgccgttggacctggacactgtctccagctgcacgacagggctagatctctggtggtgcctgcctacgcctatagaaagctgcaccccaaacagcggcctattcctagcgccttctgctttctgagccacgatcacggcaggacatgggccagaggacatttcgtggcccaggacacactggaatgccaggtggccgaagtggaaaccggcgagcagagagtcgtgaccctgaacgccagatctcacctgagagccagagtgcaggcccagagcacaaacgacggcctggatttccaagagagccagctggtcaagaaactggtggaacctcctccaaccggctgtcagggaagcgtgatcagctttccatctcctagaagcggccctggctctcctgctcagtggctgctgtatacacaccccacacacagctggcagagagccgatctgggcgcctacctgaatcctagacctcctgctcctgaggcttggagcgaacctgttctgctggccaagggcagcgctgcctacagcgatctgcagtctatgggcacaggccctgatggcagccctctgtttggctgtctgtacgaggccaacgactacgaagagatcgtgttcctgatgttcaccctgaagcaggcctttccagccgagtacctgcctcaagagcccaaatcttctgacaaaactcacacatgcccaccgtgcccagcacctgaactcctggggggaccgtcagtcttcctcttccccccaaaacccaaggacaccctcatgatctcccggacccctgaggtcacatgcgtggtggtggacgtgagccacgaagaccctgaggtcaagttcaactggtacgtggacggcgtggaggtgcataatgccaagacaaagccgcgggaggagcagtacaacagcacgtaccgtgtggtcagcgtcctcaccgtcctgcaccaggactggctgaatggcaaggagtacaagtgcaaggtctccaacaaagccctcccagcccccatcgagaaaaccatctccaaagccaaagggcagccccgagaaccacaggtctacaccctgcccccatcccgggaggagatgaccaagaaccaggtcagcctgacctgcctggtcaaaggcttctatcccagcgacatcgccgtggagtgggagagcaatgggcagccggagaacaactacaagaccacgcctcccgtgctggactccgacggctccttcttcctctatagcaagctcaccgtggacaagagcaggtggcagcaggggaacgtcttctcatgctccgtgatgcatgaggctctgcacaaccactacacgcagaagagcctctccctgtctccgggtaaa

SEQ ID NO: 240 - protein, 612 aa, Artificial Sequence
  Description of Artificial Sequence: Synthetic polypeptide
DASLPYLQKESVFQSGAHAYRIPALLYLPGQQSLLAFAEQRRSKKDEHAELIVLRRGDYDAGTHQVQWQAQEVVAQARLDGHRSMNPCPLYDEQTGTLFLFFIAIPGQVTEQQQLQTRANVTRLCYVTSTDHGRTWSSPRDLTDAAIGPAYREWSTFAVGPGHCLQLHDRARSLVVPAYAYRKLHPKQRPIPSAFCFLSHDHGRTWARGHFVAQDTLECQVAEVETGEQRVVTLNARSHLRFRVQAQSTNDGLDFQESQLVKKLVEPPPQGCQGSVISFPSPRSGPGSPAQWLLYTHPTHSWQRADLGAYLNPRPPAPEAWSEPVLLAKGSAAYSDLQSMGTGPDGSPLFGCLYEANDYEEIVFLMFTLKQAFPAEYLPQEPKSSDKTHTCPPCPAPELLGGPSVFLFPPKPKDTLMISRTPEVTCVVVDVSHEDPEVKFNWYVDGVEVHNAKTKPREEQYNSTYRVVSVLTVLHQDWLNGKEYKCKVSNKALPAPIEKTISKAKGQPREPQVYTLPPSREEMTKNQVSLTCLVKGFYPSDIAVEWESNGQPENNYKTTPPVLDSDGSFFLYSKLTVDKSRWQQGNVFSCSVMHEALHNHYTQKSLSLSPGK

SEQ ID NO: 241 - DNA, 1836 bp, Artificial Sequence
  Description of Artificial Sequence: Synthetic polynucleotide
gatgcatctctgccttacctgcagaaagaaagcgtgttccagtctggcgcccacgcctacagaattcccgctctgctgtatctgccaggccagcagtctctgctggctttcgctgaacagcggcggagcaagaaggatgagcacgccgaactgatcgtgctgcggagaggcgattacgacgccggcacacatcaggtgcagtggcaggctcaagaggtggtggctcaggctagactggacggccacagatctatgaacccctgtcctctgtacgatgaacagaccggcacactgtttctgttctttatcgctatccccggccaagtgaccgagcagcagcagctgcagacaagagccaacgtgaccagactgtgttacgtgacctccaccgaccacggcagaacctggtctagccctagagatctgaccgacgccgccatcggacctgcctatagagagtggtccaccttcgccgttggacctggacactgtctccagctgcacgacagggctagatctctggtggtgcctgcctacgcctatagaaagctgcaccccaaacagcggcctattcctagcgccttctgctttctgagccacgatcacggcaggacatgggccagaggacatttcgtggcccaggacacactggaatgccaggtggccgaagtggaaaccggcgagcagagagtcgtgaccctgaacgccagatctcacctgagattcagagtgcaggcccagagcacaaacgacggcctggatttccaagagagccagctggtcaagaaactggtggaacctcctccacagggctgtcagggaagcgtgatcagctttccatctcctagaagcggccctggctctcctgctcagtggctgctgtatacacaccccacacacagctggcagagagccgatctgggcgcctacctgaatcctagacctcctgctcctgaggcttggagcgaacctgttctgctggccaagggcagcgctgcctacagcgatctgcagtctatgggcacaggccctgatggcagccctctgtttggctgtctgtacgaggccaacgactacgaagagatcgtgttcctgatgttcaccctgaagcaggcctttccagccgagtacctgcctcaagagcccaaatcttctgacaaaactcacacatgcccaccgtgcccagcacctgaactcctggggggaccgtcagtcttcctcttccccccaaaacccaaggacaccctcatgatctcccggacccctgaggtcacatgcgtggtggtggacgtgagccacgaagaccctgaggtcaagttcaactggtacgtggacggcgtggaggtgcataatgccaagacaaagccgcgggaggagcagtacaacagcacgtaccgtgtggtcagcgtcctcaccgtcctgcaccaggactggctgaatggcaaggagtacaagtgcaaggtctccaacaaagccctcccagcccccatcgagaaaaccatctccaaagccaaagggcagccccgagaaccacaggtctacaccctgcccccatcccgggaggagatgaccaagaaccaggtcagcctgacctgcctggtcaaaggcttctatcccagcgacatcgccgtggagtgggagagcaatgggcagccggagaacaactacaagaccacgcctcccgtgctggactccgacggctccttcttcctctatagcaagctcaccgtggacaagagcaggtggcagcaggggaacgtcttctcatgctccgtgatgcatgaggctctgcacaaccactacacgcagaagagcctctccctgtctccgggtaaa

SEQ ID NO: 242 - protein, 612 aa, Artificial Sequence
  Description of Artificial Sequence: Synthetic polypeptide
DASLPYLQKESVFQSGAHAYRIPALLYLPGQQSLLAFAEQRRSKKDEHAELIVLRRGDYDAGTHQVQWQAQEVVAQARLDGHRSMNPCPLYDEQTGTLFLFFIAIPGQVTEQQQLQTRANVTRLCYVTSTDHGRTWSSPRDLTDAAIGPAYREWSTFAVGPGHCLQLHDRARSLVVPAYAYRKLHPKQRPIPSAFCFLSHDHGRTWARGHFVAQDTLECQVAEVETGEQRVVTLNARSHLRFRVQAQSTNDGLDFQESQLVKKLVEPPPTGCQGSVISFPSPRSGPGSPAQWLLYTHPTHSWQRADLGAYLNPRPPAPEAWSEPVLLAKGSCAYSDLQSMGTGPDGSPLFGCLYEANDYEEIVFLMFTLKQAFPAEYLPQEPKSSDKTHTCPPCPAPELLGGPSVFLFPPKPKDTLMISRTPEVTCVVVDVSHEDPEVKFNWYVDGVEVHNAKTKPREEQYNSTYRVVSVLTVLHQDWLNGKEYKCKVSNKALPAPIEKTISKAKGQPREPQVYTLPPSREEMTKNQVSLTCLVKGFYPSDIAVEWESNGQPENNYKTTPPVLDSDGSFFLYSKLTVDKSRWQQGNVFSCSVMHEALHNHYTQKSLSLSPGK

SEQ ID NO: 243 - DNA, 1836 bp, Artificial Sequence
  Description of Artificial Sequence: Synthetic polynucleotide
gatgcatctctgccttacctgcagaaagaaagcgtgttccagtctggcgcccacgcctacagaattcccgctctgctgtatctgccaggccagcagtctctgctggctttcgctgaacagcggcggagcaagaaggatgagcacgccgaactgatcgtgctgcggagaggcgattacgacgccggcacacatcaggtgcagtggcaggctcaagaggtggtggctcaggctagactggacggccacagatctatgaacccctgtcctctgtacgatgaacagaccggcacactgtttctgttctttatcgctatccccggccaagtgaccgagcagcagcagctgcagacaagagccaacgtgaccagactgtgttacgtgacctccaccgaccacggcagaacctggtctagccctagagatctgaccgacgccgccatcggacctgcctatagagagtggtccaccttcgccgttggacctggacactgtctccagctgcacgacagggctagatctctggtggtgcctgcctacgcctatagaaagctgcaccccaaacagcggcctattcctagcgccttctgctttctgagccacgatcacggcaggacatgggccagaggacatttcgtggcccaggacacactggaatgccaggtggccgaagtggaaaccggcgagcagagagtcgtgaccctgaacgccagatctcacctgagattcagagtgcaggcccagagcacaaacgacggcctggatttccaagagagccagctggtcaagaaactggtggaacctcctccaaccggctgtcagggaagcgtgatcagctttccatctcctagaagcggccctggctctcctgctcagtggctgctgtatacacaccccacacacagctggcagagagccgatctgggcgcctacctgaatcctagacctcctgctcctgaggcttggagcgaacctgttctgctggccaagggcagctgtgcctacagcgatctgcagtctatgggcacaggccctgatggcagccctctgtttggctgtctgtacgaggccaacgactacgaagagatcgtgttcctgatgttcaccctgaagcaggcctttccagccgagtacctgcctcaagagcccaaatcttctgacaaaactcacacatgcccaccgtgcccagcacctgaactcctggggggaccgtcagtcttcctcttccccccaaaacccaaggacaccctcatgatctcccggacccctgaggtcacatgcgtggtggtggacgtgagccacgaagaccctgaggtcaagttcaactggtacgtggacggcgtggaggtgcataatgccaagacaaagccgcgggaggagcagtacaacagcacgtaccgtgtggtcagcgtcctcaccgtcctgcaccaggactggctgaatggcaaggagtacaagtgcaaggtctccaacaaagccctcccagcccccatcgagaaaaccatctccaaagccaaagggcagccccgagaaccacaggtctacaccctgcccccatcccgggaggagatgaccaagaaccaggtcagcctgacctgcctggtcaaaggcttctatcccagcgacatcgccgtggagtgggagagcaatgggcagccggagaacaactacaagaccacgcctcccgtgctggactccgacggctccttcttcctctatagcaagctcaccgtggacaagagcaggtggcagcaggggaacgtcttctcatgctccgtgatgcatgaggctctgcacaaccactacacgcagaagagcctctccctgtctccgggtaaa

SEQ ID NO: 244 - protein, 874 aa, Artificial Sequence
  Description of Artificial Sequence: Synthetic polypeptide
DASLPYLQKESVFQSGAHAYRIPALLYLPGQQSLLAFAEQRRSKKDEHAELIVLRRGDYDAGTHQVQWQAQEVVAQARLDGHRSMNPCPLYDEQTGTLFLFFIAIPGQVTEQQQLQTRANVTRLCYVTSTDHGRTWSSPRDLTDAAIGPAYREWSTFAVGPGHCLQLHDRARSLVVPAYAYRKLHPKQRPIPSAFCFLSHDHGRTWARGHFVAQDTLECQVAEVETGEQRVVTLNARSHLRFRVQAQSTNDGLDFQESQLVKKLVEPPPTGCQGSVISFPSPRSGPGSPAQWLLYTHPTHSWQRADLGAYLNPRPPAPEAWSEPVLLAKGSAAYSDLQSMGTGPDGSPLFGCLYEANDYEEIVFLMFTLKQAFPAEYLPQGGGGSGGGGSDKTHTCPPCPAPELLGGPSVFLFPPKPKDTLMISRTPEVTCVVVDVSHEDPEVKFNWYVDGVEVHNAKTKPREEQYNSTYRVVSVLTVLHQDWLNGKEYKCKVSNKALPAPIEKTISKAKGQPREPQVYTLPPSREEMTKNQVSLTCLVKGFYPSDIAVEWESNGQPENNYKTTPPVLDSDGSFFLYSKLTVDKSRWQQGNVFSCSVMHEALHNHYTQKSLSLSPGKGGGGSGGGGSGGGGSEVQLVESGGGLVQPGGSLRLSCAASGFNIKDTYIHWVRQAPGKGLEWVARIYPTNGYTRYADSVKGRFTISADTSKNTAYLQMNSLRAEDTAVYYCSRWGGDGFYAMDYWGQGTLVTVSSGGGGSGGGGSGGGGSDIQMTQSPSSLSASVGDRVTITCRASQDVNTAVAWYQQKPGKAPKLLIYSASFLYSGVPSRFSGSRSGTDFTLTISSLQPEDFATYYCQQHYTTPPTFGQGTKVEIK

SEQ ID NO: 245 - DNA, 1350 bp, Artificial Sequence
  Description of Artificial Sequence: Synthetic polynucleotide
gaggtgcagctggttgaatctggcggaggactggttcagcctggcggatctctgagactgtcttgtgccgccagcggcttcaacatcaaggacacctacatccactgggtccgacaggcccctggcaaaggacttgaatgggtcgccagaatctaccccaccaacggctacaccagatacgccgactctgtgaagggcagattcaccatcagcgccgacaccagcaagaacaccgcctacctgcagatgaacagcctgagagccgaggacaccgccgtgtactactgttctagatggggaggcgacggcttctacgccatggattattggggccagggcaccctggtcaccgtttcttctgctagcaccaagggcccatccgtcttccccctggcaccctcctccaagagcacctctgggggcacagcggccctgggctgcctggtcaaggactacttccccgaaccggtgacggtgtcctggaactcaggcgctctgaccagcggcgtgcacaccttcccggctgtcctacagtcctcaggactctactccctcagcagcgtggtgaccgtgccctccagcagcttgggcacccagacctacatctgcaacgtgaatcacaagcccagcaacaccaaggtggacaagaaagttgagcccaaatcttgtgacaaaactcacacatgcccaccgtgcccagcacctgaactcctggggggaccgtcagtcttcctcttccccccaaaacccaaggacaccctcatgatctcccggacccctgaggtcacatgcgtggtggtggacgtgagccacgaagaccctgaggtcaagttcaactggtacgtggacggcgtggaggtgcataatgccaagacaaagccgcgggaggagcagtacaacagcacgtaccgtgtggtcagcgtcctcaccgtcctgcaccaggactggctgaatggcaaggagtacaagtgcaaggtctccaacaaagccctcccagcccccatcgagaaaaccatctccaaagccaaagggcagccccgagaaccacaggtctacaccctgcccccatcccgggaggagatgaccaagaaccaggtcagcctgacctgcctggtcaaaggcttctatcccagcgacatcgccgtggagtgggagagcaatgggcagccggagaacaactacaagaccacgcctcccgtgctggactccgacggctccttcttcctcaccagcaagctcaccgtggacaagagcaggtggcagcaggggaacgtcttctcatgctccgtgatgcatgaggctctgcacaaccactacacgcagaagagcctctccctgtctccgggtaaa

SEQ ID NO: 246 - DNA, 1836 bp, Artificial Sequence
  Description of Artificial Sequence: Synthetic polynucleotide
gatgcatctctgccttacctgcagaaagaaagcgtgttccagtctggcgcccacgcctacagaattcccgctctgctgtatctgccaggccagcagtctctgctggctttcgctgaacagcggcggagcaagaaggatgagcacgccgaactgatcgtgctgcggagaggcgattacgacgccggcacacatcaggtgcagtggcaggctcaagaggtggtggctcaggctagactggacggccacagatctatgaacccctgtcctctgtacgatgaacagaccggcacactgtttctgttctttatcgctatccccggccaagtgaccgagcagcagcagctgcagacaagagccaacgtgaccagactgtgttacgtgacctccaccgaccacggcagaacctggtctagccctagagatctgaccgacgccgccatcggacctgcctatagagagtggtccaccttcgccgttggacctggacactgtctccagctgcacgacagggctagatctctggtggtgcctgcctacgcctatagaaagctgcaccccaaacagcggcctattcctagcgccttctgctttctgagccacgatcacggcaggacatgggccagaggacatttcgtggcccaggacacactggaatgccaggtggccgaagtggaaaccggcgagcagagagtcgtgaccctgaacgccagatctcacctgagattcagagtgcaggcccagagcacaaacgacggcctggatttccaagagagccagctggtcaagaaactggtggaacctcctccaaccggctgtcagggaagcgtgatcagctttccatctcctagaagcggccctggctctcctgctcagtggctgctgtatacacaccccacacacagctggcagagagccgatctgggcgcctacctgaatcctagacctcctgctcctgaggcttggagcgaacctgttctgctggccaagggcagcgctgcctacagcgatctgcagtctatgggcacaggccctgatggcagccctctgtttggctgtctgtacgaggccaacgactacgaagagatcgtgttcctgatgttcaccctgaagcaggcctttccagccgagtacctgcctcaagagcccaaatcttctgacaaaactcacacatgcccaccgtgcccagcacctgaactcctggggggaccgtcagtcttcctcttccccccaaaacccaaggacaccctcatgatctcccggacccctgaggtcacatgcgtggtggtggacgtgagccacgaagaccctgaggtcaagttcaactggtacgtggacggcgtggaggtgcataatgccaagacaaagccgcgggaggagcagtacaacagcacgtaccgtgtggtcagcgtcctcaccgtcctgcaccaggactggctgaatggcaaggagtacaagtgcaaggtctccaacaaagccctcccagcccccatcgagaaaaccatctccaaagccaaagggcagccccgagaaccacaggtctacaccctgcccccatcccgggaggagatgaccaagaaccaggtcagcctgtactgcctggtcaaaggcttctatcccagcgacatcgccgtggagtgggagagcaatgggcagccggagaacaactacaagaccacgcctcccgtgctggactccgacggctccttcttcctctatagcaagctcaccgtggacaagagcaggtggcagcaggggaacgtcttctcatgctccgtgatgcatgaggctctgcacaaccactacacgcagaagagcctctccctgtctccgggtaaa

SEQ ID NO: 247 - protein, 874 aa, Artificial Sequence
  Description of Artificial Sequence: Synthetic polypeptide
  MOD_RES (1)..(1): Ala, Arg, Asn, Asp, Gln, Glu, Gly, His, Leu, Lys, Met, Phe, Thr, Val, or not present
  MOD_RES (6)..(6): Phe, Trp, Tyr or Val
  MOD_RES (9)..(9): Lys or Asp
  MOD_RES (42)..(42): Arg or Ala
  MOD_RES (62)..(62): Pro, Asn, Asp, His, Glu, Gly, Ser or Thr
  MOD_RES (93)..(93): Ala, Glu, or Lys
  MOD_RES (126)..(126): Gln, Leu, Glu, Phe, His, Ile, Leu, or Tyr
  MOD_RES (187)..(187): Arg, Ile, or Lys
  MOD_RES (242)..(242): Ala, Cys, Phe, Gly, His, Ile, Lys, Leu, Met, Asn, Gln, Arg, Ser, Val, Trp, or Tyr
  MOD_RES (270)..(270): Gln, Ala, His, Phe, Pro, Ser, or Thr
  MOD_RES (301)..(301): Ser, Arg, Ala, Asp, Glu, Phe, Gly, His, Ile, Lys, Leu, Met, Asn, Pro, Gln, Thr, Val, Trp, or Tyr
  MOD_RES (302)..(302): Trp, Lys, Ala, Asp, Glu, Phe, Gly, His, Ile, Lys, Leu, Met, Asn, Pro, Gln, Arg, Ser, Thr, Val, or Tyr
  MOD_RES (332)..(332): Ala, Cys, Ser, or Val
  MOD_RES (363)..(363): Val or Arg
  MOD_RES (365)..(365): Leu, Gln, His, Ile, Lys, or Ser
  MOD_RES (381)..(390): This region may encompass one of the following sequences: "GGGGS" or "GGGGSGGGGS" or "EPKSS"
  See specification as filed for detailed description of substitutions and preferred embodiments
XASLPXLQXESVFQSGAHAYRIPALLYLPGQQSLLAFAEQRXSKKDEHAELIVLRRGDYDAXTHQVQWQAQEVVAQARLDGHRSMNPCPLYDXQTGTLFLFFIAIPGQVTEQQQLQTRANVTRLCXVTSTDHGRTWSSPRDLTDAAIGPAYREWSTFAVGPGHCLQLHDRARSLVVPAYAYRKLHPXQRPIPSAFCFLSHDHGRTWARGHFVAQDTLECQVAEVETGEQRVVTLNARSHLRXRVQAQSTNDGLDFQESQLVKKLVEPPPXGCQGSVISFPSPRSGPGSPAQWLLYTHPTHXXQRADLGAYLNPRPPAPEAWSEPVLLAKGSXAYSDLQSMGTGPDGSPLFGCLYEANDYEEIXFXMFTLKQAFPAEYLPQXXXXXXXXXXDKTHTCPPCPAPELLGGPSVFLFPPKPKDTLMISRTPEVTCVVVDVSHEDPEVKFNWYVDGVEVHNAKTKPREEQYNSTYRVVSVLTVLHQDWLNGKEYKCKVSNKALPAPIEKTISKAKGQPREPQVYTLPPSREEMTKNQVSLTCLVKGFYPSDIAVEWESNGQPENNYKTTPPVLDSDGSFFLYSKLTVDKSRWQQGNVFSCSVMHEALHNHYTQKSLSLSPGKGGGGSGGGGSGGGGSEVQLVESGGGLVQPGGSLRLSCAASGFNIKDTYIHWVRQAPGKGLEWVARIYPTNGYTRYADSVKGRFTISADTSKNTAYLQMNSLRAEDTAVYYCSRWGGDGFYAMDYWGQGTLVTVSSGGGGSGGGGSGGGGSDIQMTQSPSSLSASVGDRVTITCRASQDVNTAVAWYQQKPGKAPKLLIYSASFLYSGVPSRFSGSRSGTDFTLTISSLQPEDFATYYCQQHYTTPPTFGQGTKVEIK

SEQ ID NO: 248 - protein, 874 aa, Artificial Sequence
  Description of Artificial Sequence: Synthetic polypeptide
  MOD_RES (1)..(1): Ala, Arg, Asn, Asp, Gln, Glu, Gly, His, Leu, Lys, Met, Phe, Thr, Val, or not present
  MOD_RES (2)..(2): Ala or Lys
  MOD_RES (4)..(4): Asn or Leu
  MOD_RES (5)..(5): Pro or His
  MOD_RES (6)..(6): Phe, Trp, Tyr or Val
  MOD_RES (9)..(9): Lys or Asp
  MOD_RES (42)..(42): Ala or Arg
  MOD_RES (44)..(44): Lys, Arg, or Glu
  MOD_RES (45)..(45): Lys, Ala, Arg, or Glu
  MOD_RES (54)..(54): Leu or Met
  MOD_RES (62)..(62): Pro, Asn, Asp, His, Glu, Gly, Ser or Thr
  MOD_RES (69)..(69): Gln or His
  MOD_RES (78)..(78): Arg or Lys
  MOD_RES (80)..(80): Asp or Pro
  MOD_RES (93)..(93): Ala, Glu or Lys
  MOD_RES (107)..(107): Gly or Asp
  MOD_RES (108)..(108): Gln or His
  MOD_RES (112)..(112): Gln, Arg, or Lys
  MOD_RES (125)..(125): Ala, Cys, Ile, Ser, Val, or Leu
  MOD_RES (126)..(126): Gln, Leu, Glu, Phe, His, Ile, Leu, or Tyr
  MOD_RES (150)..(150): Ala or Val
  MOD_RES (164)..(164): Cys or Gly
  MOD_RES (170)..(170): Arg or Pro
  MOD_RES (171)..(171): Ala or Gly
  MOD_RES (187)..(187): Arg, Ile, or Lys
  MOD_RES (188)..(188): Gln or Pro
  MOD_RES (189)..(189): Arg or Pro
  MOD_RES (196)..(196): Ala, Cys, Leu, or Val
  MOD_RES (213)..(213): Ala, Cys, Asn, Ser, or Thr
  MOD_RES (217)..(217): Leu, Ala, or Val
  MOD_RES (225)..(225): Glu or Pro
  MOD_RES (239)..(239): His or Pro
  MOD_RES (240)..(240): Leu, Asp, Asn, or Tyr
  MOD_RES (241)..(241): Arg, Ala, Asp, Leu, Gln, or Tyr
  MOD_RES (242)..(242): Ala, Cys, Phe, Gly, His, Ile, Lys, Leu, Met, Asn, Gln, Arg, Ser, Val, Trp, or Tyr
  MOD_RES (244)..(244): Val, Ile, or Lys
  MOD_RES (249)..(249): Thr or Ala
  MOD_RES (251)..(251): Asp or Gly
  MOD_RES (257)..(257): Glu, Lys, or Pro
  MOD_RES (258)..(258): Ser or Cys
  MOD_RES (260)..(260): Leu, Asp, Phe, Gln, or Thr
  MOD_RES (265)..(265): Val or Phe
  MOD_RES (270)..(270): Gln, Ala, His, Phe, Pro, Ser, or Thr
  MOD_RES (272)..(272): Cys or Val
  MOD_RES (292)..(292): Trp or Arg
  MOD_RES (301)..(301): Ser, Arg, Ala, Asp, Glu, Phe, Gly, His, Ile, Lys, Leu, Met, Asn, Pro, Gln, Thr, Val, Trp, or Tyr
  MOD_RES (302)..(302): Trp, Lys, Ala, Asp, Glu, Phe, Gly, His, Ile, Lys, Leu, Met, Asn, Pro, Gln, Arg, Ser, Thr, Val, or Tyr
  MOD_RES (325)..(325): Lys or Val
  MOD_RES (332)..(332): Ala, Cys, Ser, or Val
  MOD_RES (352)..(352): Cys, Leu, or Val
  MOD_RES (363)..(363): Val or Arg
  MOD_RES (365)..(365): Leu, Gln, His, Ile, Lys, or Ser
  MOD_RES (381)..(390): This region may encompass one of the following sequences: "GGGGS" or "GGGGSGGGGS" or "EPKSS"
  See specification as filed for detailed description of substitutions and preferred embodiments
XXSXXXLQXESVFQSGAHAYRIPALLYLPGQQSLLAFAEQRXSXXDEHAELIVXRRGDYDAXTHQVQWXAQEVVAQAXLXGHRSMNPCPLYDXQTGTLFLFFIAIPXXVTEXQQLQTRANVTRLXXVTSTDHGRTWSSPRDLTDAAIGPXYREWSTFAVGPGHXLQLHDXXRSLVVPAYAYRKLHPXXXPIPSAFXFLSHDHGRTWARGHFVXQDTXECQVAEVXTGEQRVVTLNARSXXXXRXQAQSXNXGLDFQXXQXVKKLXEPPPXGXQGSVISFPSPRSGPGSPAQXLLYTHPTHXXQRADLGAYLNPRPPAPEAWSEPXLLAKGSXAYSDLQSMGTGPDGSPLFGXLYEANDYEEIXFXMFTLKQAFPAEYLPQXXXXXXXXXXDKTHTCPPCPAPELLGGPSVFLFPPKPKDTLMISRTPEVTCVVVDVSHEDPEVKFNWYVDGVEVHNAKTKPREEQYNSTYRVVSVLTVLHQDWLNGKEYKCKVSNKALPAPIEKTISKAKGQPREPQVYTLPPSREEMTKNQVSLTCLVKGFYPSDIAVEWESNGQPENNYKTTPPVLDSDGSFFLYSKLTVDKSRWQQGNVFSCSVMHEALHNHYTQKSLSLSPGKGGGGSGGGGSGGGGSEVQLVESGGGLVQPGGSLRLSCAASGFNIKDTYIHWVRQAPGKGLEWVARIYPTNGYTRYADSVKGRFTISADTSKNTAYLQMNSLRAEDTAVYYCSRWGGDGFYAMDYWGQGTLVTVSSGGGGSGGGGSGGGGSDIQMTQSPSSLSASVGDRVTITCRASQDVNTAVAWYQQKPGKAPKLLIYSASFLYSGVPSRFSGSRSGTDFTLTISSLQPEDFATYYCQQHYTTPPTFGQGTKVEIK

SEQ ID NO: 249 - protein, 869 aa, Artificial Sequence
  Description of Artificial Sequence: Synthetic polypeptide
DASLPYLQKESVFQSGAHAYRIPALLYLPGQQSLLAFAEQRRSKKDEHAELIVLRRGDYDAGTHQVQWQAQEVVAQARLDGHRSMNPCPLYDEQTGTLFLFFIAIPGQVTEQQQLQTRANVTRLCYVTSTDHGRTWSSPRDLTDAAIGPAYREWSTFAVGPGHCLQLHDRARSLVVPAYAYRKLHPKQRPIPSAFCFLSHDHGRTWARGHFVAQDTLECQVAEVETGEQRVVTLNARSHLRFRVQAQSTNDGLDFQESQLVKKLVEPPPTGCQGSVISFPSPRSGPGSPAQWLLYTHPTHSWQRADLGAYLNPRPPAPEAWSEPVLLAKGSAAYSDLQSMGTGPDGSPLFGCLYEANDYEEIVFLMFTLKQAFPAEYLPQEPKSSDKTHTCPPCPAPELLGGPSVFLFPPKPKDTLMISRTPEVTCVVVDVSHEDPEVKFNWYVDGVEVHNAKTKPREEQYNSTYRVVSVLTVLHQDWLNGKEYKCKVSNKALPAPIEKTISKAKGQPREPQVYTLPPSREEMTKNQVSLTCLVKGFYPSDIAVEWESNGQPENNYKTTPPVLDSDGSFFLYSKLTVDKSRWQQGNVFSCSVMHEALHNHYTQKSLSLSPGKGGGGSGGGGSGGGGSEVQLVESGGGLVQPGGSLRLSCAASGFNIKDTYIHWVRQAPGKGLEWVARIYPTNGYTRYADSVKGRFTISADTSKNTAYLQMNSLRAEDTAVYYCSRWGGDGFYAMDYWGQGTLVTVSSGGGGSGGGGSGGGGSDIQMTQSPSSLSASVGDRVTITCRASQDVNTAVAWYQQKPGKAPKLLIYSASFLYSGVPSRFSGSRSGTDFTLTISSLQPEDFATYYCQQHYTTPPTFGQGTKVEIK

SEQ ID NO: 250 - protein, 612 aa, Artificial Sequence
  Description of Artificial Sequence: Synthetic polypeptide
DASLPYLQKESVFQSGAHAYRIPALLYLPGQQSLLAFAEQRRSKKDEHAELIVLRRGDYDAGTHQVQWQAQEVVAQARLDGHRSMNPCPLYDEQTGTLFLFFIAIPGQVTEQQQLQTRANVTRLCYVTSTDHGRTWSSPRDLTDAAIGPAYREWSTFAVGPGHCLQLHDRARSLVVPAYAYRKLHPKQRPIPSAFCFLSHDHGRTWARGHFVAQDTLACQVAEVETGEQRVVTLNARSHLRFRVQAQSTNDGLDFQESQLVKKLVEPPPTGCQGSVISFPSPRSGPGSPAQWLLYTHPTHSWQRADLGAYLNPRPPAPEAWSEPVLLAKGSAAYSDLQSMGTGPDGSPLFGCLYEANDYEEIVFLMFTLKQAFPAEYLPQEPKSSDKTHTCPPCPAPELLGGPSVFLFPPKPKDTLMISRTPEVTCVVVDVSHEDPEVKFNWYVDGVEVHNAKTKPREEQYNSTYRVVSVLTVLHQDWLNGKEYKCKVSNKALPAPIEKTISKAKGQPREPQVYTLPPSREEMTKNQVSLYCLVKGFYPSDIAVEWESNGQPENNYKTTPPVLDSDGSFFLYSKLTVDKSRWQQGNVFSCSVMHEALHNHYTQKSLSLSPGK

SEQ ID NO: 251 - DNA, 1836 bp, Artificial Sequence
  Description of Artificial Sequence: Synthetic polynucleotide
gatgcatctctgccttacctgcagaaagaaagcgtgttccagtctggcgcccacgcctacagaattcccgctctgctgtatctgccaggccagcagtctctgctggctttcgctgaacagcggcggagcaagaaggatgagcacgccgaactgatcgtgctgcggagaggcgattacgacgccggcacacatcaggtgcagtggcaggctcaagaggtggtggctcaggctagactggacggccacagatctatgaacccctgtcctctgtacgatgaacagaccggcacactgtttctgttctttatcgctatccccggccaagtgaccgagcagcagcagctgcagacaagagccaacgtgaccagactgtgttacgtgacctccaccgaccacggcagaacctggtctagccctagagatctgaccgacgccgccatcggacctgcctatagagagtggtccaccttcgccgttggacctggacactgtctccagctgcacgacagggctagatctctggtggtgcctgcctacgcctatagaaagctgcaccccaaacagcggcctattcctagcgccttctgctttctgagccacgatcacggcaggacatgggccagaggacatttcgtggcccaggacacactggcctgccaggtggccgaagtggaaaccggcgagcagagagtcgtgaccctgaacgccagatctcacctgagattcagagtgcaggcccagagcacaaacgacggcctggatttccaagagagccagctggtcaagaaactggtggaacctcctccaaccggctgtcagggaagcgtgatcagctttccatctcctagaagcggccctggctctcctgctcagtggctgctgtatacacaccccacacacagctggcagagagccgatctgggcgcctacctgaatcctagacctcctgctcctgaggcttggagcgaacctgttctgctggccaagggcagcgctgcctacagcgatctgcagtctatgggcacaggccctgatggcagccctctgtttggctgtctgtacgaggccaacgactacgaagagatcgtgttcctgatgttcaccctgaagcaggcctttccagccgagtacctgcctcaagagcccaaatcttctgacaaaactcacacatgcccaccgtgcccagcacctgaactcctggggggaccgtcagtcttcctcttccccccaaaacccaaggacaccctcatgatctcccggacccctgaggtcacatgcgtggtggtggacgtgagccacgaagaccctgaggtcaagttcaactggtacgtggacggcgtggaggtgcataatgccaagacaaagccgcgggaggagcagtacaacagcacgtaccgtgtggtcagcgtcctcaccgtcctgcaccaggactggctgaatggcaaggagtacaagtgcaaggtctccaacaaagccctcccagcccccatcgagaaaaccatctccaaagccaaagggcagccccgagaaccacaggtctacaccctgcccccatcccgggaggagatgaccaagaaccaggtcagcctgtactgcctggtcaaaggcttctatcccagcgacatcgccgtggagtgggagagcaatgggcagccggagaacaactacaagaccacgcctcccgtgctggactccgacggctccttcttcctctatagcaagctcaccgtggacaagagcaggtggcagcaggggaacgtcttctcatgctccgtgatgcatgaggctctgcacaaccactacacgcagaagagcctctccctgtctccgggtaaa

SEQ ID NO: 252 - protein, 10 aa, Artificial Sequence
  Description of Artificial Sequence: Synthetic 10xHis tag
HHHHHHHHHH

SEQ ID NO: 253 - protein, 15 aa, Artificial Sequence
  Description of Artificial Sequence: Synthetic peptide
  SITE (1)..(15): This sequence may encompass 1-5 "Gly Gly Pro" repeating units
GGPGGPGGPGGPGGP

SEQ ID NO: 254 - protein, 25 aa, Artificial Sequence
  Description of Artificial Sequence: Synthetic peptide
  SITE (1)..(25): This sequence may encompass 1-5 "Gly Gly Gly Gly Ser" repeating units
GGGGSGGGGSGGGGSGGGGSGGGGS

What is claimed is:

1. A fusion protein comprising:
(a) a recombinant mutant human sialidase, wherein the sialidase comprises a substitution of an alanine residue at a position corresponding to position 42 of wild-type human Neu2 (A42); and
(b) an anti-HER2 immunoglobulin antigen-binding domain.

2. The fusion protein of claim 1, wherein the alanine residue at a position corresponding to position 42 of wild-type human Neu2 is substituted by arginine (A42R).

3. The fusion protein of claim 1 or 2, wherein the sialidase comprises:
(a) a substitution of a proline residue at a position corresponding to position 5 of wild-type human Neu2 (P5);
(b) a substitution of a lysine residue at a position corresponding to position 9 of wild-type human Neu2 (K9);
(c) a substitution of a lysine residue at a position corresponding to position 44 of wild-type human Neu2 (K44);
(d) a substitution of a lysine residue at a position corresponding to position 45 of wild-type human Neu2 (K45);
(e) a substitution of a leucine residue at a position corresponding to position 54 of wild-type human Neu2 (L54);
(f) a substitution of a proline residue at a position corresponding to position 62 of wild-type human Neu2 (P62);
(g) a substitution of a glutamine residue at a position corresponding to position 69 of wild-type human Neu2 (Q69);
(h) a substitution of an arginine residue at a position corresponding to position 78 of wild-type human Neu2 (R78);
(i) a substitution of an aspartic acid residue at a position corresponding to position 80 of wild-type human Neu2 (D80);
(j) a substitution of an alanine residue at a position corresponding to position 93 of wild-type human Neu2 (A93);
(k) a substitution of a glycine residue at a position corresponding to position 107 of wild-type human Neu2 (G107);
(l) a substitution of a glutamine residue at a position corresponding to position 108 of wild-type human Neu2 (Q108);
(m) a substitution of a glutamine residue at a position corresponding to position 112 of wild-type human Neu2 (Q112);
(n) a substitution of a cysteine residue at a position corresponding to position 125 of wild-type human Neu2 (C125);
(o) a substitution of a glutamine residue at a position corresponding to position 126 of wild-type human Neu2 (Q126);
(p) a substitution of an alanine residue at a position corresponding to position 150 of wild-type human Neu2 (A150);
(q) a substitution of a cysteine residue at a position corresponding to position 164 of wild-type human Neu2 (C164);
(r) a substitution of an arginine residue at a position corresponding to position 170 of wild-type human Neu2 (R170);
(s) a substitution of an alanine residue at a position corresponding to position 171 of wild-type human Neu2 (A171);
(t) a substitution of a glutamine residue at a position corresponding to position 188 of wild-type human Neu2 (Q188);
(u) a substitution of an arginine residue at a position corresponding to position 189 of wild-type human Neu2 (R189);
(v) a substitution of an alanine residue at a position corresponding to position 213 of wild-type human Neu2 (A213);
(w) a substitution of a leucine residue at a position corresponding to position 217 of wild-type human Neu2 (L217);
(x) a substitution of a glutamic acid residue at a position corresponding to position 225 of wild-type human Neu2 (E225);
(y) a substitution of a histidine residue at a position corresponding to position 239 of wild-type human Neu2 (H239);
(z) a substitution of a leucine residue at a position corresponding to position 240 of wild-type human Neu2 (L240);
(aa) a substitution of an arginine residue at a position corresponding to position 241 of wild-type human Neu2 (R241);
(bb) a substitution of an alanine residue at a position corresponding to position 242 of wild-type human Neu2 (A242);
(cc) a substitution of a valine residue at a position corresponding to position 244 of wild-type human Neu2 (V244);
(dd) a substitution of a threonine residue at a position corresponding to position 249 of wild-type human Neu2 (T249);
(ee) a substitution of an aspartic acid residue at a position corresponding to position 251 of wild-type human Neu2 (D251);
(ff) a substitution of a glutamic acid residue at a position corresponding to position 257 of wild-type human Neu2 (E257);
(gg) a substitution of a serine residue at a position corresponding to position 258 of wild-type human Neu2 (S258);
(hh) a substitution of a leucine residue at a position corresponding to position 260 of wild-type human Neu2 (L260);
(ii) a substitution of a valine residue at a position corresponding to position 265 of wild-type human Neu2 (V265);
(jj) a substitution of a glutamine residue at a position corresponding to position 270 of wild-type human Neu2 (Q270);
(kk) a substitution of a tryptophan residue at a position corresponding to position 292 of wild-type human Neu2 (W292);
(11) a substitution of a serine residue at a position corresponding to position 301 of wild-type human Neu2 (S301);
(mm) a substitution of a tryptophan residue at a position corresponding to position 302 of wild-type human Neu2 (W302);
(nn) a substitution of a valine residue at a position corresponding to position 363 of wild-type human Neu2 (V363); or
(oo) a substitution of a leucine residue at a position corresponding to position 365 of wild-type human Neu2 (L365);
or a combination of any of the foregoing substitutions.

4. The fusion protein of any one of claims 1-3, wherein the sialidase comprises a substitution of K9, P62, A93, Q126, A242, Q270, S301, W302, V363, or L365, or a combination of any of the foregoing substitutions.

5. The fusion protein of claim 3 or 4, wherein, in the sialidase:
(a) the proline residue at a position corresponding to position 5 of wild-type human Neu2 is substituted by histidine (P5H);
(b) the lysine residue at a position corresponding to position 9 of wild-type human Neu2 is substituted by aspartic acid (K9D);
(c) the lysine residue at a position corresponding to position 44 of wild-type human Neu2 is substituted by arginine (K44R) or glutamic acid (K44E);
(d) the lysine residue at a position corresponding to position 45 of wild-type human Neu2 is substituted by alanine (K45A), arginine (K45R), or glutamic acid (K45E);
(e) the leucine residue at a position corresponding to position 54 of wild-type human Neu2 is substituted by methionine (L54M);
(f) the proline residue at a position corresponding to position 62 of wild-type human Neu2 is substituted by asparagine (P62N), aspartic acid (P62D), histidine (P62H), glutamic acid (P62E), glycine (P62G), serine (P62S), or threonine (P62T);
(g) the glutamine residue at a position corresponding to position 69 of wild-type human Neu2 is substituted by histidine (Q69H);
(h) the arginine residue at a position corresponding to position 78 of wild-type human Neu2 is substituted by lysine (R78K);
(i) the aspartic acid residue at a position corresponding to position 80 of wild-type human Neu2 is substituted by proline (D80P);
(j) the alanine residue at a position corresponding to position 93 of wild-type human Neu2 is substituted by glutamic acid (A93E) or lysine (A93K);
(k) the glycine residue at a position corresponding to position 107 of wild-type human Neu2 is substituted by aspartic acid (G107D);
(l) the glutamine residue at a position corresponding to position 108 of wild-type human Neu2 is substituted by histidine (Q108H);
(m) the glutamine residue at a position corresponding to position 112 of wild-type human Neu2 is substituted by arginine (Q112R) or lysine (Q112K);
(n) the cysteine residue at a position corresponding to position 125 of wild-type human Neu2 is substituted by leucine (C125L);
(o) the glutamine residue at a position corresponding to position 126 of wild-type human Neu2 is substituted by leucine (Q126L), glutamic acid (Q126E), phenylalanine (Q126F), histidine (Q126H), isoleucine (Q1261), or tyrosine (Q126Y);
(p) the alanine residue at a position corresponding to position 150 of wild-type human Neu2 is substituted by valine (A150V);
(q) the cysteine residue at a position corresponding to position 164 of wild-type human Neu2 is substituted by glycine (C164G);
(r) the arginine residue at a position corresponding to position 170 of wild-type human Neu2 is substituted by proline (R170P);
(s) the alanine residue at a position corresponding to position 171 of wild-type human Neu2 is substituted by glycine (A171G);
(t) the glutamine residue at a position corresponding to position 188 of wild-type human Neu2 is substituted by proline (Q188P);
(u) the arginine residue at a position corresponding to position 189 of wild-type human Neu2 is substituted by proline (R189P);
(v) the alanine residue at a position corresponding to position 213 of wild-type human Neu2 is substituted by cysteine (A213C), asparagine (A213N), serine (A213S) or threonine (A213T);
(w) the leucine residue at a position corresponding to position 217 of wild-type human Neu2 is substituted by alanine (L217A) or valine (L217V);
(x) the glutamic acid residue at a position corresponding to position 225 of wild-type human Neu2 is substituted by proline (E225P);
(y) the histidine residue at a position corresponding to position 239 of wild-type human Neu2 is substituted by proline (H239P);
(z) the leucine residue at a position corresponding to position 240 of wild-type human Neu2 is substituted by aspartic acid (L240D), asparagine (L240N), or tyrosine (L240Y);
(aa) the arginine residue at a position corresponding to position 241 of wild-type human Neu2 is substituted by alanine (R241A), aspartic acid (R241D), leucine (R241L), glutamine (R241Q), or tyrosine (R241Y);
(bb) the alanine residue at a position corresponding to position 242 of wild-type human Neu2 is substituted by cysteine (A242C), phenylalanine (A242F), glycine (A242G), histidine (A242H), isoleucine (A242I), lysine (A242K), leucine (A242L), methionine (A242M), asparagine (A242N), glutamine (A242Q),
arginine (A242R), serine (A242S), valine (A242V), tryptophan (A242W), or tyrosine (A242Y);
(cc) the valine residue at a position corresponding to position 244 of wild-type human Neu2 is substituted by isoleucine (V244I) or proline (V244P);
(dd) the threonine residue at a position corresponding to position 249 of wild-type human Neu2 is substituted by alanine (T249A);
(ee) the aspartic acid residue at a position corresponding to position 251 of wild-type human Neu2 is substituted by glycine (D251G);
(ff) the glutamic acid residue at a position corresponding to position 257 of wild-type human Neu2 is substituted by proline (E257P);
(gg) the serine residue at a position corresponding to position 258 is substituted by cysteine (S258C);
(hh) the leucine residue at a position corresponding to position 260 of wild-type human Neu2 is substituted by aspartic acid (L260D), phenylalanine (L260F), glutamine (L260Q), or threonine (L260T);
(ii) the valine residue at a position corresponding to position 265 of wild-type human Neu2 is substituted by phenylalanine (V265F);
(jj) the glutamine residue at a position corresponding to position 270 of wild-type human Neu2 is substituted by alanine (Q270A), histidine (Q270H), phenylalanine (Q270F), proline (Q270P), serine (Q270S), or threonine (Q270T);
(kk) the tryptophan residue at a position corresponding to position 292 of wild-type human Neu2 is substituted by arginine (W292R);
(ll) the serine residue at a position corresponding to position 301 of wild-type human Neu2 is substituted by alanine (S301A), aspartic acid (S301D), glutamic acid (S301E), phenylalanine (S301F), histidine (S301H), lysine (S301K), leucine (S301L), methionine (S301M), asparagine (S301N), proline (S301P), glutamine (S301Q), arginine (S301R), threonine (S301T), valine (S301V), tryptophan (S301W), or tyrosine (S301Y);
(mm) the tryptophan residue at a position corresponding to position 302 of wild-type human Neu2 is substituted by alanine (W302A), aspartic acid (W302D), phenylalanine (W302F), glycine (W302G), histidine (W302H), isoleucine (W302I), lysine (W302K), leucine (W302L), methionine (W302M), asparagine (W302N), proline (W302P), glutamine (W302Q), arginine (W302R), serine (W302S), threonine (W302T), valine (W302V), or tyrosine (W302Y);
(nn) the valine residue at a position corresponding to position 363 of wild-type human Neu2 is substituted by arginine (V363R); or
(oo) the leucine residue at a position corresponding to position 365 of wild-type human Neu2 is substituted by glutamine (L365Q), histidine (L365H), isoleucine (L365I), lysine (L365K) or serine (L365S);
or the sialidase comprises a combination of any of the foregoing substitutions.

6. The fusion protein of claim 5, wherein the sialidase comprises a substitution selected from the K9D, P62G, P62N, P62S, P62T, A93E, Q126Y, A242F, A242W, A242Y, Q270A, Q270T, S301A, S301R, W302K, W302R, V363R, and L365I substitutions, or a combination of any of the foregoing substitutions.

7. The fusion protein of any one of claims 1-6, wherein the sialidase comprises:
(a) a substitution or deletion of a methionine residue at a position corresponding to position 1 of wild-type human Neu2 (M1);
(b) a substitution of a valine residue at a position corresponding to position 6 of wild-type human Neu2 (V6);
(c) a substitution of an isoleucine residue at a position corresponding to position 187 of wild-type human Neu2 (I187); or
(d) a substitution of a cysteine residue at a position corresponding to position 332 of wild-type human Neu2 (C332);
or a combination of any of the foregoing substitutions.

8. The fusion protein of claim 7, wherein, in the sialidase:
(a) the methionine residue at a position corresponding to position 1 of wild-type human Neu2 is deleted (ΔM1), is substituted by alanine (MIA), or is substituted by aspartic acid (MID);
(b) the valine residue at a position corresponding to position 6 of wild-type human Neu2 is substituted by tyrosine (V6Y);
(c) the isoleucine residue at a position corresponding to position 187 of wild-type human Neu2 is substituted by lysine (I187K); or
(d) the cysteine residue at a position corresponding to position 332 of wild-type human Neu2 is substituted by alanine (C332A);
or the sialidase comprises a combination of any of the foregoing substitutions.

9. The fusion protein of claim 8, wherein the sialidase comprises the MID, V6Y, A42R, P62G, A93E, Q126Y, I187K, A242F, Q270T, and C332 Å substitutions.

10. The fusion protein of any one of claims 1-9, wherein the sialidase is selected from Neu1, Neu2, Neu3, and Neu4.

11. The fusion protein of claim 10, wherein the sialidase is Neu2.

12. The fusion protein of any one of claims 1-11, wherein the sialidase has a different substrate specificity than the corresponding wild-type sialidase.

13. The fusion protein of claim 12, wherein the sialidase can cleave a2,3, a2,6, and/or a2,8 linkages.

14. The fusion protein of claim 13, wherein the sialidase can cleave a2,3 and a2,8 linkages.

15. The fusion protein of any one of claims 1-14, wherein the sialidase comprises SEQ ID NO: 198.

16. The fusion protein of any one of claims 1-15, wherein the sialidase comprises a mutation or combination of mutations set forth in any one of TABLES 1-11.

17. The fusion protein of any one of claims 1-16, wherein the fusion protein further comprises an immunoglobulin Fc domain.

18. The fusion protein of claim 17, wherein the immunoglobulin Fc domain is derived from a human IgG1, IgG2, IgG3, IgG4, IgA1, IgA2, IgD, IgE, or IgM Fc domain.

19. The fusion protein of claim 18, wherein the immunoglobulin Fc domain is derived from a human IgG1, IgG2, IgG3, or IgG4 Fc domain.

20. The fusion protein of claim 19, wherein the immunoglobulin Fc domain is derived from a human IgG1 Fc domain.

21. The fusion protein of any one of claims 1-20, wherein the anti-HER2 immunoglobulin antigen-binding domain is associated with a second anti-HER2 immunoglobulin antigen-binding domain to produce an anti-HER2 antigen-binding site.

22. The fusion protein of any one of claims 1-21, wherein the anti-HER2 immunoglobulin antigen-binding domain is derived from an antibody selected from trastuzumab, pertuzumab, CT-P6, trastuzumab-dkst, MGAH22 (margetuximab), PF-05280014, ertumaxomab, gancotamab, timigutuzumab, Ontruzant, ABP-980, SB3, DS-8201, MYL-1410, BCD-022, and HD201.

23. The fusion protein of claim 22, wherein the anti-HER2 immunoglobulin antigen-binding domain is derived from trastuzumab.

24. The fusion protein of any one of claims 1-23, wherein the sialidase and the immunoglobulin Fc domain and/or the anti-HER2 immunoglobulin antigen-binding domain are linked by a peptide bond or an amino acid linker.

25. The fusion protein of any one of claims 1-24, wherein the fusion protein comprises any one of SEQ ID NOs: 203-208.

26. An antibody conjugate comprising the fusion protein of any one of claims 1-25.

27. The antibody conjugate of claim 26, wherein the antibody conjugate comprises a single sialidase.

28. The antibody conjugate of claim 26, wherein the antibody conjugate comprises two sialidases.

29. The antibody conjugate of claim 28, wherein the two sialidases are identical.

30. The antibody conjugate of any one of claims 26-29, wherein the antibody conjugate comprises a single anti-HER2 antigen-binding site.

31. The antibody conjugate of any one of claims 26-29, wherein the antibody conjugate comprises two anti-HER2 antigen-binding sites.

32. The antibody conjugate of claim 31, wherein the two anti-HER2 antigen-binding sites are identical.

33. The antibody conjugate of any one of claims 26-32, wherein the antibody conjugate has a molecular weight from about 135 kDa to about 165 kDa.

34. The antibody conjugate of any one of claims 26-32, wherein the antibody conjugate has a molecular weight from about 215 kDa to about 245 kDa.

35. The antibody conjugate of any one of claims 26-34, wherein the antibody conjugate comprises:
(a) a first polypeptide comprising an immunoglobulin light chain;
(b) a second polypeptide comprising an immunoglobulin heavy chain; and
(c) a third polypeptide comprising an immunoglobulin Fc domain and a sialidase;
wherein the first and second polypeptides are covalently linked together and the second and third polypeptides are linked together, and wherein the first polypeptide and the second polypeptide together define an anti-HER2 antigen-binding site.

36. The antibody conjugate of claim 35, wherein the third polypeptide comprises the sialidase and the immunoglobulin Fc domain in an N- to C-terminal orientation.

37. The antibody conjugate of claim 35 or 36, wherein the first polypeptide comprises SEQ ID NO: 66.

38. The antibody conjugate of any one of claims 35-37, wherein the second polypeptide comprises any one of SEQ ID NOs: 67 or 189.

39. The antibody conjugate of any one of claims 35-38, wherein the third polypeptide comprises any one of SEQ ID NOs: 203-208.

40. The antibody conjugate of any one of claims 35-39, wherein the first polypeptide comprises SEQ ID NO: 66, the second polypeptide comprises SEQ ID NO: 189, and the third polypeptide comprises SEQ ID NO: 205.

41. The antibody conjugate of any one of claims 26-34, wherein the fusion protein comprises:
(a) a first polypeptide comprising a first immunoglobulin light chain;
(b) a second polypeptide comprising a first immunoglobulin heavy chain and a first sialidase;
(c) a third polypeptide comprising a second immunoglobulin heavy chain and a second sialidase; and
(d) a fourth polypeptide comprising a second immunoglobulin light chain;
wherein the first and second polypeptides are covalently linked together, the third and fourth polypeptides are covalently linked together, and the second and third polypeptides are covalently linked together, and wherein the first polypeptide and the second polypeptide together define a first anti-HER2 antigen-binding site, and the third polypeptide and the fourth polypeptide together define a second anti-HER2 antigen-binding site.

42. The antibody conjugate of claim 41, wherein the second and third polypeptides comprise the first and second immunoglobulin heavy chain and the first and second sialidase, respectively, in an N- to C-terminal orientation.

43. The antibody conjugate of any one of claims 26-34, wherein the fusion protein comprises:
(a) a first polypeptide comprising a first sialidase, a first immunoglobulin Fc domain, and a first single chain variable fragment (scFv); and
(b) a second polypeptide comprising a second sialidase, a second immunoglobulin Fc domain, and a second single chain variable fragment (scFv);
wherein the first and second polypeptides are covalently linked together, and wherein the first scFv defines a first anti-HER2 antigen-binding site, and the second scFv defines a second anti-HER2 antigen-binding site.

44. The antibody conjugate of claim 43, wherein the first polypeptide comprises the first sialidase, the first immunoglobulin Fc domain, and the first scFv in an N- to C-terminal orientation, and the second polypeptide comprises the second sialidase, the second immunoglobulin Fc domain, and the second scFv in an N- to C-terminal orientation.

45. The antibody conjugate of claim 43 or 44, wherein the first polypeptide comprises SEQ ID NO: 244 or SEQ ID NO: 249 and/or wherein the second polypeptide comprises SEQ ID NO: 244 or SEQ ID NO: 249.

46. The antibody conjugate of any one of claims 26-34, wherein the antibody conjugate comprises:
(a) a first polypeptide comprising an immunoglobulin light chain;
(b) a second polypeptide comprising an immunoglobulin heavy chain and a single chain variable fragment (scFv); and
(c) a third polypeptide comprising an immunoglobulin Fc domain and a sialidase;
wherein the first and second polypeptides are covalently linked together and the second and third polypeptides are covalently linked together, and wherein the immunoglobulin light chain and immunoglobulin heavy chain together define a first anti-HER2 antigen-binding site and the scFv defines a second anti-HER2 antigen-binding site.

47. The antibody conjugate of claim 46, wherein the second polypeptide comprises the immunoglobulin heavy chain and the scFv in an N- to C-terminal orientation, and the third polypeptide comprises the sialidase and the immunoglobulin Fc domain in an N- to C-terminal orientation.

48. An isolated nucleic acid comprising a nucleotide sequence encoding the fusion protein of any one of claims 1-25, or at least a portion of the antibody conjugate of any one of claims 26-47.

49. An expression vector comprising the nucleic acid of claim 48.

50. A host cell comprising the expression vector of claim 49.

51. A pharmaceutical composition comprising the fusion protein of any one of claims 1-25 or the antibody conjugate of any one of claims 26-47.

52. A method of treating cancer in a subject in need thereof, the method comprising administering to the subject an effective amount of the fusion protein of any one of claims 1-25, the antibody conjugate of any one of claims 26-47, or the pharmaceutical composition of claim 51.

53. The method of claim 52, wherein the cancer is selected from lung bronchioloalveolar carcinoma (BAC), bladder cancer, a female genital tract malignancy (e.g., uterine serous carcinoma, endometrial carcinoma, vulvar squamous cell carcinoma, and uterine sarcoma), an ovarian surface epithelial carcinoma (e.g., clear cell carcinoma of the ovary, epithelial ovarian cancer, fallopian tube cancer, and primary peritoneal cancer), breast carcinoma, non-small cell lung cancer (NSCLC), a male genital tract malignancy (e.g., testicular cancer), retroperitoneal or peritoneal carcinoma, gastroesophageal adenocarcinoma, esophagogastric junction carcinoma, liver hepatocellular carcinoma, esophageal and esophagogastric junction carcinoma, cervical cancer, cholangiocarcinoma, pancreatic adenocarcinoma, extrahepatic bile duct adenocarcinoma, a small intestinal malignancy, gastric adenocarcinoma, cancer of unknown primary (CUP), colorectal adenocarcinoma, esophageal carcinoma, prostatic adenocarcinoma, kidney cancer, head and neck squamous carcinoma, thymic carcinoma, non-melanoma skin cancer, thyroid carcinoma (e.g., papillary carcinoma), a head and neck cancer, anal carcinoma, non-epithelial ovarian cancer (non-EOC), uveal melanoma, malignant pleural mesothelioma, small cell lung cancer (SCLC), a central nervous system cancer, a neuroendocrine tumor, and a soft tissue tumor.

54. The method of claim 52 or 53, wherein the cancer is breast cancer.

55. The method of claim 52 or 53, wherein the cancer is non-small cell lung cancer.

56. The method of claim 52 or 53, wherein the cancer is bladder cancer.

57. The method of claim 52 or 53, wherein the cancer is kidney cancer.

58. The method of claim 52 or 53, wherein the cancer is colon cancer.

59. The method of claim 52 or 53, wherein the cancer is melanoma.

60. A method of promoting infiltration of immune cells into a tumor in a subject in need thereof, the method comprising administering to the subject an effective amount of the fusion protein of any one of claims 1-25, the antibody conjugate of any one of claims 26-47, or the pharmaceutical composition of claim 51.

61. The method of claim 60, wherein the immune cells are T-cells.

62. The method of claim 61, wherein the T-cells are CD4+ T-cells and/or CD8+ T-cells.

63. The method of claim 62, wherein the CD8+ T-cells are CD69⁺CD8⁺ and/or GzmB⁺CD8⁺ T-cells.

64. The method of claim 60, wherein the immune cells are natural killer (NK) cells.

65. A method of increasing the number of circulating natural killer (NK) cells in a subject in need thereof, the method comprising administering to the subject an effective amount of the fusion protein of any one of claims 1-25, the antibody conjugate of any one of claims 26-47, or the pharmaceutical composition of claim 51, so as to increase the number of circulating NK cells relative to prior to administration of the fusion protein, antibody conjugate or pharmaceutical composition.

66. A method of increasing the number of T-cells in the draining lymph node in subject in need thereof, the method comprising administering to the subject an effective amount of the fusion protein of any one of claims 1-25, the antibody conjugate of any one of claims 26-47, or the pharmaceutical composition of claim 51, so as to increase the number of T-cells in the draining lymph node relative to prior to administration of the fusion protein, antibody conjugate or pharmaceutical composition.

67. The method of claim 66, wherein the T-cells are CD4+ T-cells and/or CD8+ T-cells.

68. A method of increasing expression of Cd3, Cd4, Cd8, Cd274, Ctla4, Icos, Pdcd1, Lag3, Il6, Il1b, Il2, Ifng, Ifna1, Mx1, Gzmb, Cxcl9, Cxcl12, and/or Ccl5 in a cell, tissue, or subject, the method comprising contacting the cell, tissue, or subject with an effective amount of the fusion protein of any one of claims 1-25, the antibody conjugate of any one of claims 26-47, or the pharmaceutical composition of claim 51, so as to increase the expression of Cd3, Cd4, Cd8, Cd274, Ctla4, Icos, Pdcd1, Lag3, Il6, Il1b, Il2, Ifng, Ifna1, Mx1, Gzmb, Cxcl9, Cxcl12, and/or Ccl5 relative to the cell, tissue or subject prior to contact with the fusion protein, antibody conjugate or pharmaceutical composition.
